(19) United States
(12) Patent Application Publication
(10) Pub. No.: US 2020/0002383 A1
(43) Pub. Date: Jan. 2, 2020

(54) COMPOSITIONS COMPRISING HIV ENVELOPES TO INDUCE CH235 LINEAGE ANTIBODIES

(71) Applicants: Duke University, Durham, NC (US); Los Alamos National Security, LLC, Los Alamos, NM (US)

(72) Inventors: Barton F. HAYNES, Durham, NC (US); Mattia BONSIGNORI, Durham, NC (US); Hua-Xin LIAO, Durham, NC (US); Bette T. KORBER, Los Alamos, NM (US); Peter T. HRABER, Los Alamos, NM (US); Kevin SAUNDERS, Durham, NC (US)

(21) Appl. No.: 16/081,581

(22) PCT Filed: Mar. 1, 2017
(86) PCT No.: PCT/US2017/020249

§ 371 Date: Aug. 31, 2018

Related U.S. Application Data
(60) Provisional application No. 62/403,503, filed on Oct. 3, 2016.
(60) Provisional application No. 62/302,017, filed on Mar. 1, 2016.

(51) Int. Cl. C07K 14/005; C12N 7/00; A61K 39/21; A61K 45/06; A61K 39/39

(52) U.S. Cl. CPC C07K 14/005; C12N 7/00; A61K 39/21; A61K 2039/545; A61K 39/39; C12N 2740/16122; C12N 2740/16134; A61K 45/06

(57) ABSTRACT

In certain aspects the invention provides HIV-1 immunogens, including HIV-1 envelope selections from individual CH505, and methods for swarm immunizations using combinations of HIV-1 envelopes.

[0001] This application claims the benefit of and priority to U.S. Ser. No. 62/302,017 filed Mar. 1, 2016, and U.S. Ser. No. 62/403,503 filed Oct. 3, 2016, the contents of each of which are hereby incorporated by reference in their entireties.

[0002] This invention was made with government support under Center for HIV/AIDS Vaccine Immunology-Immunogen Design grant UM1-AI100645 from the NIH, NIAID, Division of AIDS. The government has certain rights in the invention. The United States government also has rights in this invention pursuant to Contract No. DE-AC52-06NA25396 between the United States Department of Energy and Los Alamos National Security, LLC for the operation of Los Alamos National Laboratory.

### TECHNICAL FIELD

[0003] The present invention relates in general, to a composition suitable for use in inducing anti-HIV-1 antibodies, and, in particular, to immunogenic compositions comprising envelope proteins and nucleic acids to induce cross-reactive neutralizing antibodies and increase their breadth of coverage. The invention also relates to methods of inducing such broadly neutralizing anti-HIV-1 antibodies using such compositions.

### BACKGROUND

[0004] The development of a safe and effective HIV-1 vaccine is one of the highest priorities of the scientific community working on the HIV-1 epidemic. While anti-retroviral treatment (ART) has dramatically prolonged the lives of HIV-1 infected patients, ART is not routinely available in developing countries.

### SUMMARY OF THE INVENTION

[0005] In certain embodiments, the invention provides compositions and method for induction of immune response, for example cross-reactive (broadly) neutralizing Ab induction. In certain embodiments, the methods use compositions comprising “swarms” of sequentially evolved envelope viruses that occur in the setting of bnAb generation in vivo in HIV-1 infection.

[0006] In certain aspects the invention provides compositions comprising a selection of HIV-1 envelopes and/or nucleic acids encoding these envelopes as described herein for example but not limited to Selections as described herein. Without limitations, these selected combinations comprise envelopes which provide representation of the sequence (genetic) and antigenic diversity of the HIV-1 envelope variants which lead to the induction and maturation of the CH103 and CH235 antibody lineages. In certain embodiments the selections of envelopes comprise envelopes which show differential binding to an antibody or antibodies from CH103 and CH235 lineages (FIGS. 14-16, FIGS. 17-24). Non-limiting embodiments of various selections of immunogens are described in Example 3. In certain embodiments, these compositions are used in immunization methods as a prime and/or boost.

[0007] In certain embodiments the selections of envelopes comprise envelopes which show differential binding to an antibody or antibodies from CH103 and CH235 lineages (FIGS. 14-16, FIGS. 17-24). In certain aspects, the invention provides a kit comprising a combination/selection of immunogens of Example 3. In some embodiments the selection of immunogens is selection F, selection G, or selection H. In some embodiments the kit comprises instructions on how to carry out the immunization regimen. In some embodiments the kit comprises instructions on administration of the selection of immunogens as a prime or boost as part of a prime/boost immunization regimen. In certain aspects, the invention provides a kit comprising any one of the immunogens of Example 3, or in selection F, G, or H and instructions on how to carry out an immunization regimen with the immunogen of the kit, including which immunogen(s) are a prime immunization and which immunogen(s) comprise a boost immunization. In some embodiments the kit comprises instructions on administration of the immunogen as a prime or as a boost as part of a prime/boost immunization regimen. In some embodiments the immunogen could be administered sequentially or additively.

[0008] In certain aspects, the invention provides a kit comprising Env M5, M11, 20.14, 30.20, 30.12, 30.21 30.23, 30.25, 30.28, 53.25, 53.29, 53.31, 78.15, 100.B6 and/or 136.B18. In some embodiments the kit comprises instructions on how to carry out the immunization regimen, including which immunogen(s) are a prime immunization and which immunogen(s) comprise a boost immunization. In some embodiments the kit comprises instructions on administration of the immunogen as a prime or as a boost as part of a prime/boost immunization regimen.

[0009] In some embodiments, the kit comprises Env M5, M11, w20.14, w30.20 and/or w136.B18 and instructions on administration of the immunogen as a prime or boost as part of a prime/boost immunization regimen with M5, M11, w20.14, w30.20 and/or w136.B18, including which immunogen(s) are a prime immunization and which immunogen(s) comprise a boost immunization In some embodiments, the kit comprises Env M5, w30.25, w53.25 and/or w53.29 and instructions on administration of the immunogen as a prime or boost as part of a prime/boost immunization regimen with M5, w30.25, w53.25 and/or w53.29, including which immunogen(s) are a prime immunization and which immunogen(s) comprise a boost immunization.

[0010] In one aspect the invention provides selections of envelopes from individual CH505, which selections can be used in compositions for immunizations to induce lineages of broad neutralizing antibodies. In certain embodiments, there is some variance in the immunization regimen; in some embodiments, the selection of HIV-1 envelopes may be grouped in various combinations of primes and boosts, either as nucleic acids, proteins, or combinations thereof. In certain embodiments the compositions are pharmaceutical compositions which are immunogenic. In certain embodiments, the compositions comprise amounts of envelopes which are therapeutic and/or immunogenic.

[0011] In one aspect the invention provides a composition for a prime boost immunization regimen comprising any one of the envelopes described herein, or any combination thereof wherein the envelope is a prime or boost immunogen. In certain embodiments the composition for a prime boost immunization regimen comprises one or more envelopes from FIGS. 14-16, FIGS. 17-24, Example 3, or from immunogen selection F, selection G, or selection H. In some embodiments, the composition for a prime boost immunization regimen comprises one or more envelopes M5, M11, 20.14, 30.20, 30.12, 30.21 30.23, 30.25, 30.28, 53.25, 53.29, 53.31, 78.15, 100.B6 and/or 136.B18.

[0012] In one aspect the invention provides a composition comprising any one of the envelopes described herein, or any combination thereof—for example but not limited to selections in Examples and FIGS. 14, 15, 16, 17-24. In other aspects, the invention provides use of these selections of envelopes in methods to induce an immune response. In non-limiting embodiments the envelope selections induce antibodies in the CH235 lineage, for example antibody CH557, (described in Example 8).

[0013] In some embodiments, CH505 M11 Env is administered first as a prime, followed by a mixture of a next group of Envs. In some embodiments, grouping of the envelopes is based on their binding affinity for the antibodies expected to be induced. In some embodiments, grouping of the envelopes is based on chronological evolution of envelope viruses that occurs in the setting of bnAb generation in vivo in HIV-1 infection. In some embodiments Loop D mutants could be included in either prime and/or boost. In some embodiments, the composition comprises an adjuvant. In some embodiments, the composition and methods comprise use of agents for transient modulation of the host immune response.

[0014] In one aspect the invention provides a composition comprising nucleic acids encoding HIV-1 envelope which is a loop D mutant, e.g. M11 or any other suitable D loop mutant or combination thereof, e.g. M11 and M5.

[0015] In another aspect the invention provides a method of inducing an immune response in a subject comprising administering a composition comprising HIV-1 envelope M11 and/or M5 as a prime in an amount sufficient to induce an immune response, wherein the envelope is administered as a polypeptide or a nucleic acid encoding the same. A method of inducing an immune response in a subject comprising administering a composition comprising HIV-1 envelope M11 and M5 as a prime in an amount sufficient to induce an immune response, wherein the envelope is administered as a polypeptide or a nucleic acid encoding the same.

[0016] In certain embodiments the methods comprise administering any of the selection listed in Example 3. In certain embodiments the methods comprise administering Envs M5, M11, 20.14, 30.28, 30.23, and/or 136.B18. In certain embodiments the methods comprise administering Envs M5, M11, 20.14, 30.20, 30.23, and/or 136.B18. In certain embodiments the methods comprise administering Envs M5, M11, 20.14, 30.20, 30.12, and/or 136.B18. In certain embodiments the methods comprise administering envelopes M5, 30.25, 53.25, and/or 53.29.

[0017] In certain embodiments the methods further comprise administering a composition comprising any one of HIV-1 envelope M11, w020.14, w030.28, w078.15, w053.31 or any combination thereof as a boost, wherein the envelope is administered as a polypeptide or a nucleic acid encoding the same.

[0018] In certain embodiments the methods comprise administering a composition comprising any one of HIV-1 envelope M11, M5, w020.14, w030.28, w078.15, w053.31 or any combination thereof as a boost, wherein the envelope is administered as a polypeptide or a nucleic acid encoding the same.

[0019] In another aspect the invention provides a method of inducing an immune response in a subject comprising administering a composition comprising HIV-1 envelope M11, M5, w020.14, w030.28, w078.15, w053.16, w030.21, w078.33, w100.B6, w053.31 or any combination thereof as a prime and/or boost in an amount sufficient to induce an immune response, wherein the envelope is administered as a polypeptide or a nucleic acid encoding the same.

[0020] In certain embodiments, the compositions contemplate nucleic acid, as DNA and/or RNA, or proteins immunogens either alone or in any combination. In certain embodiments, the methods contemplate genetic, as DNA and/or RNA, immunization either alone or in combination with envelope protein(s).

[0021] In certain embodiments the nucleic acid encoding an envelope is operably linked to a promoter inserted an expression vector. In certain aspects the compositions comprise a suitable carrier. In certain aspects the compositions comprise a suitable adjuvant.

[0022] In certain embodiments the induced immune response includes induction of antibodies, including but not limited to autologous and/or cross-reactive (broadly) neutralizing antibodies against HIV-1 envelope. Various assays that analyze whether an immunogenic composition induces an immune response, and the type of antibodies induced are known in the art and are also described herein.

[0023] In certain aspects the invention provides an expression vector comprising any of the nucleic acid sequences of the invention, wherein the nucleic acid is operably linked to a promoter. In certain aspects the invention provides an expression vector comprising a nucleic acid sequence encoding any of the polypeptides of the invention, wherein the nucleic acid is operably linked to a promoter. In certain embodiments, the nucleic acids are codon optimized for expression in a mammalian cell, in vivo or in vitro. In certain aspects the invention provides nucleic acids comprising any one of the nucleic acid sequences of invention. In certain aspects the invention provides nucleic acids consisting essentially of any one of the nucleic acid sequences of invention. In certain aspects the invention provides nucleic acids consisting of any one of the nucleic acid sequences of invention. In certain embodiments the nucleic acid of the invention, is operably linked to a promoter and is inserted in an expression vector. In certain aspects the invention provides an immunogenic composition comprising the expression vector.

[0024] In certain aspects the invention provides a composition comprising at least one of the nucleic acid sequences of the invention. In certain aspects the invention provides a composition comprising any one of the nucleic acid sequences of invention. In certain aspects the invention provides a composition comprising at least one nucleic acid sequence encoding any one of the polypeptides of the invention.

[0025] In certain aspects the invention provides a composition comprising at least one nucleic acid encoding HIV-1 envelope M11, M5, w020.14, w030.28, w078.15, w053.16, w030.21, w078.33, w100.B6, w053.31 or any combination thereof. Non-limiting examples of combinations are shown in Example 2.

[0026] In certain embodiments, the compositions and methods employ an HIV-1 envelope as polypeptide instead of a nucleic acid sequence encoding the HIV-1 envelope. In certain embodiments, the compositions and methods employ an HIV-1 envelope as polypeptide, a nucleic acid sequence encoding the HIV-1 envelope, or a combination thereof.

[0027] The envelope used in the compositions and methods of the invention can be a gp160, gp150, gp145, gp140, gp120, gp41, N-terminal deletion variants as described herein, cleavage resistant variants as described herein, or codon optimized sequences thereof. In certain embodiments the composition comprises envelopes as trimers. In certain embodiments, envelope proteins are multimerized, for example trimers are attached to a particle such that multiple copies of the trimer are attached and the multimerized envelope is prepared and formulated for immunization in a human. In certain embodiments, the compositions comprise envelopes, including but not limited to trimers as particulate, high-density array on liposomes or other particles, for example but not limited to nanoparticles. In some embodiments, the trimers are in a well ordered, near native like or closed conformation. In some embodiments the trimer compositions comprise a homogenous mix of native like trimers. In some embodiments the trimer compositions comprise at least 85%, 90%, 95% native like trimers.

[0028] The polypeptide contemplated by the invention can be a polypeptide comprising any one of the polypeptides described herein. The polypeptide contemplated by the invention can be a polypeptide consisting essentially of any one of the polypeptides described herein. The polypeptide contemplated by the invention can be a polypeptide consisting of any one of the polypeptides described herein. In certain embodiments, the polypeptide is recombinantly produced. In certain embodiments, the polypeptides and nucleic acids of the invention are suitable for use as an immunogen, for example to be administered in a human subject.

[0029] In certain embodiments the envelope is any of the forms of HIV-1 envelope. In certain embodiments the envelope is gp120, gp140, gp145 (i.e. with a transmembrane), gp150. In certain embodiments, gp140 designed to form a stable trimer (See Table 1, FIGS. 22-24, Example 9 for non-limiting examples of sequences of stable trimer designs). In certain embodiments envelope protomers from a trimer which is not a SOSIP timer. In certain embodiment the trimer is a SOSIP based trimer wherein each protomer comprises additional modifications. In certain embodiments, envelope trimers are recombinantly produced. In certain embodiments, envelope trimers are purified from cellular recombinant fractions by antibody binding and reconstituted in lipid comprising formulations. See for example WO2015/127108 titled “Trimeric HIV-1 envelopes and uses thereof” which content is herein incorporated by reference in its entirety. In certain embodiments the envelopes of the invention are engineered and comprise non-naturally occurring modifications.

[0030] In certain embodiments, the envelope is in a liposome. In certain embodiments the envelope comprises a transmembrane domain with a cytoplasmic tail embedded in a liposome. In certain embodiments, the nucleic acid comprises a nucleic acid sequence which encodes a gp120, gp140, gp145, gp150, gp160.

[0031] In certain embodiments, where the nucleic acids are operably linked to a promoter and inserted in a vector, the vectors is any suitable vector. Non-limiting examples, include, VSV, replicating rAdenovirus type 4, MVA, Chimp adenovirus vectors, pox vectors, and the like. In certain embodiments, the nucleic acids are administered in NanoTaxi block polymer nanospheres. In certain embodiments, the composition and methods comprise an adjuvant. Non-limiting examples include, ASO1 B, ASO1 E, gla/SE, alum, Poly I poly C (poly IC), polyIC/long chain (LC) TLR agonists, TLR7/8 and 9 agonists, or a combination of TLR7/8 and TLR9 agonists (see Moody et al. (2014) J. Virol. March 2014 vol. 88 no. 6 3329-3339), or any other adjuvant. Non-limiting examples of TLR7/8 agonist include TLR7/8 ligands, Gardiquimod, Imiquimod and R848 (resiquimod). A non-limiting embodiment of a combination of TLR7/8 and TLR9 agonist comprises R848 and oCpG in STS (see Moody et al. (2014) J. Virol. March 2014 vol. 88 no. 6 3329-3339).

[0032] In certain aspects the invention provides a cell comprising a nucleic acid encoding any one of the envelopes of the invention suitable for recombinant expression. In certain aspects, the invention provides a clonally derived population of cells encoding any one of the envelopes of the invention suitable for recombinant expression. In certain aspects, the invention provides a sable pool of cells encoding any one of the envelopes of the invention suitable for recombinant expression.

[0033] In certain aspects, the invention provides a recombinant HIV-1 envelope polypeptide from Table 1, wherein the polypeptide is a non-naturally occurring protomer designed to form an envelope trimer. The invention also provides nucleic acids encoding these recombinant polypeptide. Non-limiting examples of amino acids and nucleic acid of such protomers are shown in FIGS. 22-24.

[0034] In certain aspects the invention provides a recombinant trimer comprising three identical protomers of an envelope from Table 1. In certain aspects the invention provides an immunogenic composition comprising the recombinant trimer and a carrier, wherein the trimer comprises three identical protomers of an HIV-1 envelope listed in Table 1. In certain aspects the invention provides an immunogenic composition comprising nucleic acid encoding these recombinant HIV-1 envelope and a carrier.

[0035] In certain aspects the invention provides a selection of HIV-1 envelopes or any suitable form of a nucleic acid encoding HIV-1 envelope for use in an immunization regimen, wherein the selections of envelopes comprises envelopes M5, M11, w20.14, w30.20, w30.12, and w136.B18 (Selection F, e.g. listed in FIG. 18A) or any combination thereof, envelopes M5, w30.25, w53.25, and w53.29 (Selection G, e.g. FIG. 20) or any combination thereof, envelopes M5, w30.20, w20.14, and w30.12 (Selection H, e.g. FIG. 21) or any combination thereof. In certain aspects the invention provides a selection of HIV-1 envelopes for immunization wherein the HIV-1 envelope is a loop D mutant envelope M5 and/or M11. In certain embodiments the prime is M5.

[0036] In certain aspects the invention provides a selection of nucleic acids encoding HIV-1 envelopes for immunization wherein the nucleic acid encodes a gp120 envelope, gp120D8 envelope, a gp140 envelope (gp140C, gp140CF, gp140CFI) as soluble or stabilized protomer of a SOSIP trimer, a gp145 envelope, a gp150 envelope, or a transmembrane bound envelope.

[0037] In certain aspects the invention provides a selection of HIV-1 envelopes for immunization wherein the HIV-1 envelope is a gp120 envelope or a gp120D8 variant. In certain embodiments a composition for immunization comprises protomers that form stabilized SOSIP.III trimers.

[0038] In certain embodiments, the compositions for use in immunization further comprise an adjuvant.

[0039] In certain embodiments, wherein the compositions comprise a nucleic acid, the nucleic acid is operably linked to a promoter, and could be inserted in an expression vector.

[0040] In certain aspects, the invention provides a kit comprising a combination/selection of immunogens of from Table 1, wherein the polypeptide is a non-naturally occurring protomer designed to form an envelope trimer. In certain aspects, the invention provides a kit comprising a combination/selection of immunogens of from FIGS. 22-24. In some embodiments the kit comprises instructions on how to carry out the immunization regimen, including which immunogen(s) are a prime immunization and which immunogen(s) comprise a boost immunization. In some embodiments the kit comprises instructions on administration of the selection of immunogens as a prime or boost as part of a prime/boost immunization regimen. In certain aspects, the invention provides a kit comprising any one of the immunogens from Table 1, wherein the polypeptide is a non-naturally occurring protomer designed to form an envelope trimer and instructions on how to carry out an immunization regimen with the immunogen of the kit. In some embodiments the kit comprises instructions on administration of the immunogen as a prime or as a boost as part of a prime/boost immunization regimen. In some embodiments the immunogen could be administered sequentially or additively. In certain aspects, the invention provides a kit comprising a combination/selection of immunogens of from FIGS. 22-24.

[0041] In one aspect the invention provides a composition for a prime boost immunization regimen comprising one or more envelopes from Table 1, wherein the polypeptide is a non-naturally occurring protomer designed to form an envelope trimer, wherein the envelope is a prime or boost immunogen. In one aspect the invention provides a composition for a prime boost immunization regimen comprising one or more envelopes from FIGS. 22-24 wherein the envelope is a prime or boost immunogen.

[0042] In certain aspects the invention provides methods of inducing an immune response in a subject comprising administering a composition comprising any suitable form of a nucleic acid(s) encoding an HIV-1 envelope(s) in an amount sufficient to induce an immune response from one or more of the following groups: (a) the selection of envelopes M5, M11, w20.14, w30.20, w30.12, and w136.B18 (Selection F, e.g. listed in FIG. 18A) or any combination thereof; (b) envelopes M5, w30.25, w53.25, and w53.29 (Selection G, e.g. FIG. 20) or any combination thereof; (c) envelopes M5, w30.20, w20.14, and w30.12 (Selection H, e.g. FIG. 21) or any combination thereof and wherein the administration step can alternatively, or in addition, comprise administering an HIV-1 polypeptide(s) in an amount sufficient to induce an immune response from one or more of the following groups: (a) envelopes M5, M11, w20.14, w30.20, w30.12, and w136.B18 (Selection F, e.g. listed in FIG. 18A) or any combination thereof; (b) envelopes M5, w30.25, w53.25, and w53.29 (Selection G, e.g. FIG. 20) or any combination thereof; (c) envelopes M5, w30.20, w20.14, and w30.12 (Selection H, e.g. FIG. 21) or any combination thereof. In certain embodiments, the composition comprises M5 or a nucleic acid encoding M5 that is administered as a prime immunogen. In certain embodiments, the methods further comprise administering M11 or a nucleic acid encoding M11. In certain embodiments, the methods further comprise administering HIV-1 envelope w20.14 or a nucleic acid encoding HIV-1 envelope w20.14, followed by administering HIV-1 envelope w30.20 or a nucleic acid encoding HIV-1 envelope w30.20, and followed by administering HIV-1 envelope w30.12 or a nucleic acid encoding HIV-1 envelope w30.12. In certain embodiments, the methods further comprise administering HIV-1 envelope w136.B18 or a nucleic acid encoding HIV-1 envelope w136.B18.

[0043] In certain embodiments, the methods further comprise administering HIV-1 envelope w30.25 or a nucleic acid encoding HIV-1 envelope w30.25, HIV-1 envelope w53.25 or a nucleic acid encoding HIV-1 envelope w53.25, HIV-1 envelope w53.29 or a nucleic acid encoding HIV-1 envelope w53.29.

[0044] In certain embodiments, the nucleic acid encodes a gp120 envelope, gp120D8 envelope, a gp140 envelope (gp140C, gp140CF, gp140CFI) as soluble or stabilized protomer of a SOSIP trimer, a gp145 envelope, a gp150 envelope, or a transmembrane bound envelope. In certain embodiments, the polypeptide is gp120 envelope, gp120D8 envelope, a gp140 envelope (gp140C, gp140CF, gp140CFI) as soluble or stabilized protomer of a SOSIP trimer, a gp145 envelope, a gp150 envelope, or a transmembrane bound envelope.

[0045] In certain aspects, the invention provides a method of inducing an immune response in a subject comprising administering a composition comprising envelope CH505 T/F, followed by envelope w53.16, followed by envelope w78.33 and followed by envelope w100.B6, wherein each composition comprises the envelope as a trimer. In certain embodiments of the method the selection of immunogens is administered as nucleic acids.

[0046] In certain embodiments, the methods comprise administering an adjuvant. In certain embodiments, the methods comprise administering an agent which modulates host immune tolerance. In certain embodiments, the administered polypeptide is multimerized in a liposome or nanoparticle. In certain embodiments, the methods comprise administering one or more additional HIV-1 immunogens to induce a T cell response. Non-limiting examples include gag, nef, pol, etc.

[0047] In certain aspects, the invention provides a recombinant HIV-1 Env ectodomain trimer, comprising three gp120-gp41 protomers comprising a gp120 polypeptide and a gp41 ectodomain, wherein each protomer is the same and each protomer comprises portions from envelope BG505 HIV-1 strain and gp120 polypeptide portions from a CH505 HIV-1 strain and stabilizing mutations A316W and E64K, (see e.g. FIG. 23). In certain embodiments, the trimer is stabilized in a prefusion mature closed conformation, and wherein the trimer does not comprise non-natural disulfide bond between cysteine substitutions at positions 201 and 433 of the HXB2 reference sequence. Non-limited examples of envelopes contemplated as trimers are listed in Table 1. In some embodiments, the amino acid sequence of one monomer comprised in the trimer is shown in FIG. 22-24. In some embodiments, the trimer is immunogenic. In some embodiments the trimer binds to any one of the antibodies PGT145, PGT151, CH103UCA, CH103, VRC01, PGT128, or any combination thereof. In some embodiments the trimer does not bind to antibody 19B and/or 17B.

[0048] In certain aspects, the invention provides a pharmaceutical composition comprising any one of the recombinant trimers of the invention. In certain embodiments the compositions comprising trimers are immunogenic. The percent trimer in such immunogenic compositions could vary. In some embodiments the composition comprises 70%, 71%, 72%, 73%, 74%, 75%, 76%, 77%, 78%, 79%, 80%, 81%, 82%, 83%, 84%, 85%, 86%, 87%, 89%, 90%, 91%, 92%, 93%, 94%, 95%, 96%, 97%, 98%, 99% stabilized trimer.

[0049] In certain aspects the invention provides any suitable form of a nucleic acid encoding a HIV-1 envelope from the selections of envelopes listed in FIG. 14A (envelopes M5, M11, 20.14, 30.28, 30.23. and 136.B18), FIG. 15A (envelopes M5, M11, 20.14, 30.20, 30.23. and 136.B18), FIG. 16A (envelopes M5, M11, 20.14, 30.20, 30.12. and 136.B18), FIG. 18A (envelopes M5, M11, 20.14, 30.20, 30.12, and 136.B18), FIG. 20 (M5, 30.25; 53.25; and 53.29), FIG. 21 (M5, w30.20, w20.14, w30.12), or any combination thereof. In certain embodiments the envelopes bind preferentially to an antibody or antibodies from CH103 lineage. In certain embodiments the envelopes bind preferentially to an antibody or antibodies from CH235 lineage. In certain aspects the invention provides a polypeptide from the selections of envelopes listed in FIG. 14A (envelopes M5, M11, 20.14, 30.28, 30.23. and 136.B18), FIG. 15A (envelopes M5, M11, 20.14, 30.20, 30.23. and 136.B18), FIG. 16A (envelopes M5, M11, 20.14, 30.20, 30.12. and 136.B18), FIG. 18A (envelopes M5, M11, 20.14, 30.20, 30.12, and 136.B18), FIG. 20 (M5, 30.25; 53.25; and 53.29), FIG. 21 (M5, w30.20, w20.14, w30.12), or any combination thereof. In certain aspects the invention provides a composition comprising any suitable form of the nucleic acids of the invention. In certain aspects the invention provides a composition comprising any suitable polypeptide, wherein the polypeptide is engineered and recombinantly produced.

### BRIEF DESCRIPTION OF THE DRAWINGS

[0050] The patent or application file contains at least one drawing executed in color. To conform to the requirements for PCT patent applications, many of the figures presented herein are black and white representations of images originally created in color.

[0051] FIG. 1 shows sequences of six envelopes: CH505.M5gp145, CH505.M11gp145, CH505w020.14gp145, CH505w030.28gp145, CH505w078.15gp145, CH505w053.31gp145, also as gp120D8 and gp160 amino acid and nucleic acid sequences.

[0052] FIG. 2A shows sequences often envelopes: CH505.M5gp145, CH505.M11gp145, CH505w020.14gp145, CH505w030.28gp145, CH505w078.15gp145, CH505w53.16gp145, CH505w30.21gp145, CH505w78.33gp145, CH505w100.B6gp145, CH505w053.31gp145, amino acid and nucleic acid sequences.

[0053] FIG. 2B shows sequences of ten envelopes: CH505.M5D8gp120, CH505.M11D8gp120, CH505w020.14D8gp120, CH505w030.28D8gp120, CH505w078.15D8gp120, CH505w053.16D8gp120, CH505w030.21D8gp120, CH505w078.33D8gp120, CH505w100.B6D8gp120, CH505w053.31D8gp120 as amino acids and nucleic acids.

[0054] FIG. 2C shows sequences of ten envelopes of FIG. 2B as gp160 amino acid and nucleic acid sequences.

[0055] FIGS. 3A-C shows the genotype variation (A, left panel), neutralization titers (B, center panel), and Envelope phylogenetic relations (C, right panel) among CH505 Envelope variants. The vertical position in each panel corresponds to the same CH505 Env clone named on the right side of the tree. Distance from the Transmitted/Founder form generally increases from top towards bottom of the figure. In the left panel (A), sites not colored correspond to the Transmitted/Founder virus, red sites show mutations, and black sites correspond to insertions or deletions relative to the Transmitted/Founder virus. Additional annotation indicates the known CD4 binding-site contacts (short, vertical black bars towards top), CH103 binding-site contacts for the resolved structure (short, vertical blue bars with a horizontal line to indicate the region resolved by X-Ray Crystallography), gp120 landmarks (vertical grey rectangular regions, V1-V5 hypervariable loops, Loop D, and CD4 Loops), a dashed vertical line delineating the gp120/gp41 boundary, and results from testing for CU epitopes with ELISpot assays (magenta bands at top and bottom show where peptides were tested and negative, and a magenta rectangle for the tested positive region outside the C-terminal end of V4). The center panel (B) depicts IC50 (50% inhibitory concentrations, in μg/ml) values from autologous neutralization assays against 13 monoclonal antibodies (MAbs) of the CH103 lineage and each of 134 CH505 Env-pseudotyped viruses. Color-scale values indicate neutralization potency and range from grey (no neutralization detected) through dark red (potent neutralization, i.e. <0.2 μg/ml; empty cells correspond to absence of information). The cumulative progression of neutralization potency from left to right, corresponding to developmental stages in the CH103 lineage, indicates accumulation of neutralization potency. Similarly, increased presence neutralization signal from top to bottom corresponds to increasing neutralization breadth per MAb in the CH103 lineage. In the right-most panel (C) is the phylogeny of CH505 Envs, with the x-axis indicating distance from the Transmitted-Founder virus per the scale bar (units are mutations per site). The tree is ordered vertically such that lineages with the most descendants appear towards the bottom. Each leaf on the tree corresponds to a CH505 autologous Env, with the name of the sequence depicted (‘w’ and symbol color indicate the sample time-point; ‘M’ indicates a synthetic mutant Env). The color of text in each leaf name indicates its inclusion in a possible embodiment, or grey for exclusion from any embodiments described herein. Three long, vertical lines to the left of the tree depict the phylogenetic distribution of envelopes in three distinct alternative embodiments (identified as “Vaccination Regimes 1-3”), with diamonds used to identify each.

[0056] FIGS. 4-8 show Heat Map of Binding (log Area Under the Curve, AUC) of Sequential Envs to CH103 and CH235 CD4 Binding Site Broadly Neutralizing Antibody Lineages members. Numerical data corresponding to the graphic representations in these figures are shown in Tables 2-5 in Example 2.

[0057] FIG. 9 shows neutralization activity of CH103 clonal lineage antibodies against autologous CH505 viruses.

[0058] FIG. 10 shows neutralization susceptibility of the CH505 loop D mutants to CH103 lineage antibodies.

[0059] FIG. 11 shows CH103 ELISA binding data and choice of immunogens.

[0060] FIG. 12 shows neutralization susceptibility of CH505 loop D mutants to CH235 lineage antibodies.

[0061] FIG. 13 shows neutralization activity of CH235 clonal lineage antibodies against autologous CH505 viruses.

[0062] FIGS. 14A-B show a heat map of binding log Area Under the Curve, AUC) of Sequential Envs M5, M11, 20.14, 30.28, 30.23, 136.B18 to CH103 (FIG. 14B) and CH235 (FIG. 14A-includes lineage member CH557) CD4 Binding Site Broadly Neutralizing Antibody Lineages members.

[0063] FIGS. 15A-B show a heat map of binding log Area Under the Curve, AUC) of Sequential Envs M5, M11, 20.14, 30.20, 30.23, 136.B18 to CH103 (FIG. 15B) and CH235 (FIG. 15A-includes lineage member CH557) CD4 Binding Site Broadly Neutralizing Antibody Lineages members. Env 30.20 has better progression for CH235 whereas 30.28 has better progression for CH103, however early CH103 intermediates are covered well by 20.14.

[0064] FIGS. 16A-B show a binding log Area Under the Curve, AUC) of Sequential Envs M5, M11, 20.14, 30.20, 30.12, 136.B18 to CH103 (FIG. 16B) and CH235 (FIG. 16A-includes lineage member CH557) CD4 Binding Site Broadly Neutralizing Antibody Lineages members.

[0065] FIGS. 17A-B show amino acid and nucleic acid sequences of M5, M11, 20.14, 30.20, 30.12, 136.B18 envelopes: FIG. 17A shows sequences of gp120D8 variants, FIG. 17B shows sequences of gp160 envelopes.

[0066] FIGS. 18A-B (see also FIGS. 52A-B from Example 8) show. CH505 gp120 Env Quasi-species Selected as Optimized Immunogens to Induce Both CH235 and CH103-like bnAbs, related to FIGS. 46A-B (Ex. 8). (A) Heatmap of the binding data of selected CH235 and CH103 lineage members to the CH505 Env glycoproteins selected to be used as immunogens. Individual Env clone names and weeks of isolation are shown on the left. (A) shows a binding log Area Under the Curve, AUC) of Sequential Envs M5, M11, 20.14, 30.20, 30.12, 136.B18 to CH235 (left panel) and CH103 (right panel) CD4 Binding Site Broadly Neutralizing Antibody Lineages members. (B) Affinity of gHgL of 1B2530, 8ANC131, VRC01, VRC-PG04 and VRC-CH31 to a panel of 15 heterologous gp120 envelope glycoproteins.

[0067] FIGS. 19A-B show nucleic acid and amino acid sequences of M5, M11, 20.14, 30.20, 30.12, 136.B18 envelopes. The highlighted portions indicate non-coding sequences—one stop codon at the end of each nucleotide sequences is not highlighted.

[0068] FIG. 20 shows a selection for a Sequential Vaccine. Heat Map of Binding (log Area Under the Curve, AUC) of Sequential Envs to CH235 VH1-46 type of CD4 mimic, CD4 Binding Site Broadly Neutralizing Antibody Lineage Members for sequential immunization. X axis shows CH235 antibody lineage members, from UCA to mature antibodies, from left to right.

[0069] FIG. 21 shows a selection for a Sequential Vaccine. Heat Map of Binding (log Area Under the Curve, AUC) of Sequential Envs to CH235 VH1-46 type of CD4 mimic, CD4 Binding Site Broadly Neutralizing Antibody Lineage Members for sequential immunization.

[0070] FIG. 22A shows CH505 chimeric 6R.SOSIP.664 design. The gp120 of CH505 (right) except the c-terminal 37 amino acids was transplanted into the well-characterized A.BG505 6R.SOSIP.664 (left). The transplantation design takes advantage of the enhanced stability of the A.BG505 strain. The resultant chimeric molecule (center) has the CH505 gp120 (yellow) fused to the 37 c-terminal amino acids of A.BG505 (blue) and the A.BG505 gp41 (magenta).

[0071] FIG. 22B shows nucleic acid sequences of various trimer designs of FIG. 23A.

[0072] FIG. 23A shows amino acid sequences of various trimer designs. In some embodiments the leader sequence for these proteins is MPMGSLQPLATLYLLGMLVASVLA.

[0073] FIG. 23B shows annotated sequence of SOSIP.III design.

[0074] FIG. 24A shows amino acid and nucleic acid sequences of designs CH505TF.6R.SOSIP.664.v4.1_AMBRCTA and AMBRCTAG, and designs CH505M5chim.6R.SOSIP.664v4.1_AMBRCTA and AMBRCTAG. See also Example 9.

[0075] FIGS. 24B, C and D show sortase designs and nucleic acid and protein sequences.

[0076] FIG. 24E shows the PGT151 antibody staining of 293F cells transiently transfected with AMBRCTA and AMBRCTAG constructs of FIG. 24A. Only the TM constructs show surface expression of Trimeric Envelope.

[0077] FIG. 24F shows the quantification of SOSIP trimer in the supernatant of cells transfected with the constructs of FIG. 24A

[0078] FIG. 24G shows ferritin designs.

[0079] FIG. 24H shows antigenicity of M5 SOSIPv4.1 ferritin particle.

[0080] FIG. 24I shows comparison of binding of the M5 trimer alone versus the M5 trimer multimerized on the ferritin particle.

[0081] FIG. 24J shows negative stain EM of M5 trimers on the ferritin particle. The ring in the middle is ferritin and the trimer is the spikes coming off of the ring.

[0082] FIG. 25 shows design of rhesus macaque immunogenicity study. The immunization schedule is shown in this figure. The study compared the immunogenicity of the CD40 targeted Env to the wildtype Env in a rhesus macaque immunogneicity study. The macaques were immunized intramuscularly and electroporated twice with DNA encoding the CH505 T/F gp145. After DNA priming the macaques were administered sequential CH505 recombinant gp140C oligomers from the transmitted founder virus, and weeks 53, 78, and 100. Three macaques were immunized with the CH505 Envs conjugated to CD40 and 4 macaques were administered the CH505 Env as gp140C envelopes. We examined binding antibody titer by ELISA, neutralizing antibody titers by the TZM-bl assay, and profiled the antibody repertoire by monclonal antibody isolation. The study analyzed the immunogenicity of wildtype and CD40-targeted Env using antibody ELISA binding, TZM-bl neutralization assay, and will isolate monoclonal antibodies.

[0083] FIG. 26 shows plasma IgG responses to CH505 transmitted/founder gp140. This figure shows the binding titers over time with each symbol representing an individual macaque and the red line and symbol indicating the those animals that received the wildtype Env. The macaques that were immunized with the Env conjugated to anti-CD40 are shown in blue. The titers in both groups was comparable until week 18 which was 2 weeks after the second protein boost. After that boost with the week 53 Env the wildtype group tended to have higher binding antibody titers.

[0084] FIG. 27 shows CH505 gp140 vaccination induces plasma blocking of CD4 binding. The figure shows whether CD4 binding site antibodies were present in the plasma using competition ELISAs for soluble CD4 (shown on the left and a bnAb from the CH103 lineage called CH106 shown on the right. We examined the plasma blocking activity shown on the y-axis over time and found that at week 18 the CD4 binding site response was dramatically reduced to near background levels in the CD40 IgG4—Env group compared to the wildtype Env which showed 70 and 80% blocking of soluble CD4 and CH106 respectively.

[0085] FIG. 28 shows that plasma IgG exhibits CD4 binding site-directed binding to a resurfaced gp120 core. This figure shows the ability of the plasma IgG from all four animals to bind to RSC3 or its CD4 knock out mutant. Shown here is the difference in binding between the wildtype RSC3 and the CD4 binding site mutant over time.

[0086] FIG. 29 shows CH505 gp140 vaccination elicits high titers of autologous tier 1 virus neutralization. This figure shows the neutralization titers for each macaque represented as ID50 reciprocal dilutions against a tier 1 virus called CH505 w4.3 isolated from the CH505 individual early in infection. All 4 animals generated relatively high titers of tier 1 neutralizaing antibodies beginning with the protein boost. The titers were increased with subsequent boosts with the sequential vaccine, and notably these tier 1 neutralizing antibodies were typical for our CH505 Env vaccinations that have been performed in macaques.

[0087] FIG. 30 shows CH505 gp140 sequential vaccination boosts autologous tier 2 CH505 TF virus neutralization. This figure shows autologous tier 2 neutralization by the plasma from each macaque. The ID50 titers are shown for each macaque and we observed 1 of 4 macaques generated autologous tier 2 neutralizing antibodies in the plasma. Detectable neutralization first occurred after the CH505 week 53 Env protein boost and increased with each boost. This result was striking since this macaque was the first vaccinated macaque where we observed neutralization of the CH505 TF virus.

[0088] FIG. 31 shows autologous neutralizing antibodies against all four tier 2 viruses increased with sequential boosting. This figure shows the autologous tier 2 neutralization analysis to include the tier 2 CH505 viruses that comprise the sequential vaccination regimen. The same macaque 6207 was able to neutralize all four tier 2 CH505 viruses. The neutralization was detectable against 3 of 4 of the CH505 viruses after only 2 protein boosts, and by three boosts all 4 viruses were neutralized. We saw the neutralizing titers continued to increase with each boost.

[0089] FIG. 32 shows NHP 6207 neutralizes heterologous tier 2 virus representative global isolates. While autologous tier 2 neutralization is difficult to elicit, heterologous tier 2 neutralization is even more rare to observe in vaccinated primates. To determine whether tier 2 heterologous breadth was elicited in macaque 6207 plasma we tested neutralization against heterologous tier 2 viruses selected to represent the global circulating viruses. We examined neutralization of this 12 virus panel by the plasma at week 30-post 4 sequential protein boosts and week 36 post 5 sequential protein boosts. After 4 protein boosts two heterologous tier 2 viruses were neutralized. After the subsequent boost 9/12 of the viruses were neutralized. Although the titers were low this antibody response appears boostable and is currently the broadest tier 2 neutralization known to be achieved in a vaccinated primate.

[0090] FIG. 33 shows B cell sorting for CD4 binding site differential antibodies. Memory B cells from two macaques were sorted and compared the presence of RSC3-reactive B cells that did not bind the CD4 knock out mutant version of the protein called delta RSC3. A representative FACS plot is shown on the left for the NHP 6207 who possessed SCL70 reactive plasma IgG and developed broadly neutralizing antibodies in its plasma. For comparison we sorted RSC3-reactive B cells from NHP 6436, which did not have broad neutralization in the plasma but was the other macaque that tested positive for auto antibodies. The NHP 6207 had a relatively large percentage of RSC3 reactive B cells whereas NHP6436 had very few.

[0091] FIG. 34 shows macaque 6207 has broad plasma neutralization and antibodies against Sc170. This figure shows autoreactivity measured in the Athena assay for each of the four macaques that received the wildtype CH505 gp140C envelopes in vaccination. Median fluorescence intensity for binding to each autoantigen listed on the x-axis is depicted in separate graphs for each macaque. The positivity threshold for the assay is marked by the dotted line. Interestingly, the macaque that possessed broad neutralization possessed binding antibodies to the autoantigen SCL70, which is correlated of the autoimmune disease scleroderma. The antibodies were present prior to vaccination indicated by the binding in the grey bar. One other macaque tested positive for autoantibodies, but it bound to a different autoantigen.

[0092] FIG. 35 shows a heterologous panel heatmap of IC50s.

[0093] FIG. 36 shows the global panel, grouped by bNAb sensitivity (right panel). Env mutations over time in subject CH505, by week is shown in the left panel.

[0094] FIG. 37 shows V5 selection yields population breadth.

[0095] FIG. 38 shows mutations and V5 length.

[0096] FIG. 39 shows a selection of four envelopes from CH505 and their binding to CH235 lineage antibodies.

[0097] FIG. 40 shows a selection of CH505 immunogens to drive both CH103 and CH235 CD4 binding site types of broad neutralizing B cell lineages.

[0098] FIGS. 41A-B show CH235 Lineage, with Time of Appearance and Neutralization by Select Members. (A) Phylogram of CH235 lineage. Phylogenetic tree is colored by first time (wk post-infection) from which sequences were obtained. Key members of the CH235 lineage are labeled. CH235.6, CH235.7, CH235.8 and CH235.9 V_{H} were complemented with full heavy chain gene regions and paired with the V_{L} from the closest natural antibody. (B) Neutralization dendrograms display single mAb neutralization of a genetically diverse panel of 199 HIV-1 isolates. Coloration is by IC₅₀. See also FIGS. 48A-B, 53, and 54.

[0099] FIGS. 42A-E show structures of CH235-Lineage Members in Complex with HIV-1 Env. (A) Co-crystal structures of the antigen-binding fragments (Fabs) of CH235-lineage members with core gp120. Structures are shown in ribbon diagram, with gp120 in gray and residues altered by SHM in stick representation colored by time-of-appearance. (B) Negative stain EM of Fabs of CH235-lineage members and trimeric HIV-1 Env from BG505 (top row) and B41 (bottom row). Structures in surface representation, with Env portions colored gray and Fabs by time-of-appearance. (C) Epitope displayed on the gp120 surface and colored by antibody time-of-appearance, with the vulnerable portion of the CD4bs highlighted in yellow and select regions labeled. (D) Targeting precision of CD4bs-directed antibodies vs neutralization breadth. (E) V_{H}-gene SHM of CD4bs-directed antibodies vs neutralization breadth. See also FIGS. 49A-G and FIG. 55.

[0100] FIG. 43A-C shows sequence Evolution of CH235 Lineage: SHM, Timing, and Conformity of CH235-Lineage Development from UCA to Antibody with 90% Breadth. (A) Heavy chain SHM over time for the CH235 lineage (left panel). SHM levels of other V_{H}1-46-derived CD4bs mAbs and selected V_{H}1-2-derived VRC01-class mAbs are shown (middle and right panels, respectively); the time since infection is unknown for these mAbs. (B) Maturation conformity vs overall heavy chain SHM. Positional conformity (top row) is defined as the number of aa positions differing from the germline sequence in both the conforming and reference sequences, divided by the total number of aa changes in the conforming antibody. Identity conformity (bottom row) is defined as the number of such positions which are additionally mutated to the same residue, divided by the total number of mutations in the conforming antibody. Conformity to 1B2530 (left) and to 8ANC131 (right) is shown for both position and identity. (C) V_{H}-gene mutability accounts for the majority of positional conformity of CH235 lineage. The mutability of the V_{H}-gene for V_{H}1-46 (top) and V_{H}1-2 (bottom) is shown. Sequence logos are shown at each position; the height of each logo corresponds to the percent of mutated reads. Green bars are shown for SHM in antibody CH235, which are altered in over a quarter of V_{H}1-46-derived antibodies. See also FIGS. 50A-E and 56A-C.

[0101] FIGS. 44A-D show binding Kinetics of CH103 and CH235 Lineage Antibodies. Binding association (kₐ) and dissociation (k_{d}) rates of the CH103 (A-B, squares) and CH235 (C-D, circles) lineage mAbs to CH505.TF gp120 Env were measured with SPR and used to calculate the dissociation rate constants (K_{d}). K_{d}s are shown in A and C, kₐ (solid lines, plotted on the left y-axis) and k_{d} (dashed lines, plotted on the right y-axis) are shown in B and D. See also FIGS. 57A-B.

[0102] FIGS. 45A-C show CH235 Lineage Antibodies Neutralization of Autologous Virus and CH505.TF Loop D Mutants. (A) Heatmap analysis of neutralization of 76 pseudoviruses (row) by 16 CH235 lineage mAbs (column). Coloration is by IC₅₀. This analysis extends previous observations on early CH235 lineage antibodies (Gao et al., 2014) by including late mAbs CH235.7, CH235.8, CH235.10, CH235.11, CH235.12 and CH235.13 and by adding pseudoviruses isolated from wk 136 to 323 post-transmission. (B) CH505 TF and loop D mutants M5, M6, M10, M19, M11, M7, M8, M9, M20 and M21 neutralization by CH236 mAb, late mAbs CH235.7, CH235.9 CH235.10, CH235.11, CH235.12, CH235.13 (left panel) and CH235.9 mAb mutants (right panel). Neutralization is expressed as IC₅₀ μg/ml. CH505 TF sequence mutations are shown on the right. (C) The CDR H1 N30 (sticks, dark red) in CH235.9, which interacts with the β20-β21 loop in the bridging sheet of gp120 (cyan), is over 19 Å away from the N280S mutation site in loop D (orange). See also FIGS. 51A-B, 58, and 59.

[0103] FIGS. 46A-B show binding of CH235 and CH103 Lineage mAbs to Autologous CH505 (A) and CH235 UCA Binding to Heterologous HIV-1 Env Glycoproteins (B). (A) Heatmap analysis of UCA, intermediate (IA) and mature CH235 and CH103 lineage mAbs binding to 113 CH505 autologous Env isolated from time of infection (TF) to 160 wks post-infection and to the CH505.TF mutants (Gao et al., Cell 2014). Mabs were tested in ELISA at concentrations ranging from 100 μg/ml to 0.6 ng/ml. Binding is expressed as a LogAUC. (B) Affinity of CH235 UCA, CH235 wild-type and select SHM variants to a panel of 15 heterologous gp120 Envs. See also FIGS. 52A-B and 60.

[0104] FIGS. 47A-D show CH235 Antibody Lineage Auto- and Polyreactivity. (A) CH235 lineage antibody binding to ANA measured in ELISA. LogAUC was calculated from duplicate samples. Results representative of duplicate experiments. (B) Binding to cardiolipin was determined using Quanta Lite ACA IgG III ELISA Assay. (C) Hep2 cell IF staining. Size bars=50 (D) Measurement of polyreactivity against 9,400 human antigens using ProtoArray 5 microchip: CH235 lineage mAbs binding (x-axis) was compared to non-polyreactive control mAb 151K (y-axis). Polyreactivity is defined as 1 log stronger binding than 15 lk mAb to more than 90% of the test proteins. High affinity binding was measured as a >2 log increase in binding (dotted line) (Liu et al., 2015).

[0105] FIGS. 48A-B show CH235 Lineage: Sequences and Neutralization Fingerprint Dendrogram, related to FIGS. 41A-B. (A) Alignment of NGS sequences and antibodies isolated from 17 time points from 6 to 323 weeks post-transmission and comparison of mutation patterns to other IGHV1-46 (1B2530 and 8ANC131) and IGHV1-2 (VRC01, VRC-CH31 and VRC-PG04) derived broadly neutralizing antibodies. Antibodies isolated from single B cells are shown in bold. The positions mutated in CH235 were color coded based on the time points at which these mutations were firstly observed in the NGS reads. Mutated positions not seen in the NGS data are colored based on the time of isolation of CH235 (41 weeks). IGHV1-46*01 is used as reference for IGHV1-46 derived antibodies and IGHV1-2*02 is used as reference for the three VRC01-class antibodies. (B) The neutralization fingerprints for three antibodies from the CH235 lineage were compared to the fingerprints for other VH1-46 class antibodies and non-VH1-46 class CD4-binding-site antibodies; coloring same as in FIGS. 43A-C. Antibodies targeting other sites of vulnerability on HIV-1 Env are shown as control (black).

[0106] FIGS. 49A-G show CH235 Lineage Versus Other CD4-Binding Site Antibodies and Negative-stain EM Reconstructions of gp140 SOSIP Trimers with CH235-lineage Fabs, related to FIGS. 42A-E. (A) CD4-mimicry by CH235. Recognition of gp120 by the N-terminal domain of the CD4 receptor (far left) is compared to VH genes from CH235 and prototypic antibodies VRC01 (from VH1-2) and 8ANC131 (from VH1-46). (B) Conserved molecular interactions between antibody CH235, receptor CD4 and antibody VRC01. Top row shows intermolecular antiparallel strand interactions and bottom row Asp368 electrostatic interaction. (C) Binding orientation of VH-gene derived antibodies relative to CD4. (D) Negative-stain EM 3D models with BG505 SOSIP.664. (left) Top and side views of CH235.12 in complex with BG505 SOSIP (purple) aligned to the EM volume of VRC01 in complex with BG505 (gold mesh; EMD-6252). (middle) Top and side views of the CH235.12-BG505 complex (purple mesh) aligned to the EM volume of CH103 in complex with BG505 SOSIP (gray; EMD-6250). (right) Top and side views of the CH103-BG505 complex (gray mesh) aligned to the EM reconstruction of BG505 SOSIP in complex with soluble CD4 and 17b Fab (blue; EMDB ID 5723). (E) Negative-stain EM of gp140 SOSIP trimers with CH235-lineage Fabs. (F) Top and side views of 3D reconstructions of each complex. (G) Fourier shell correlation curves for each dataset with a resolution estimate using an FSC cutoff of 0.5.

[0107] FIGS. 50A-E shows sequence Similarity Between VH1-2 and VH1-46 Broadly Neutralizing Antibodies and Mutability of Germline Genes, related to FIGS. 43A-C. (A) Amino acid alignment of 8ANC131 and CH235 to the IGHV1-46 germline gene showing the definition of conformity. (B) Probability distribution of the number of sharing mutation positions for each pair of antibodies. (C) Probability distribution of the number of identical mutations for each pair of antibodies. (D) SHM frequency is shown versus VH-gene position for VH1-46, VH1-2 and three others. Sequences were aligned to VH1-46 and positions not aligned to VH1-46 (indels) were removed. (E) Dendrogram showing sequence segregation of VH1-2 and VH1-46 derived broadly neutralizing antibodies, despite similarity of VH1-2 and VH1-46 germline genes shown with underline.

[0108] FIGS. 51A-B shows generation of CH235.9 Mutants to Evaluate the Effect of Mutations in the V-heavy Chain on the Ability of CH235.9 to Neutralize loop D Mutant CH505 Autologous Viruses, related to FIGS. 45A-C. (A) The interaction between CH235 CDR L3 (purple) and N280 in the HIV-1 gp120 Env loop D (orange) from the crystal structure of the CH235-gp120 complex (left panel). Asparagine in position 280 in gp120 forms three hydrogen bonds (yellow dotted lines) with residues in the CDR L3 (left panel). Structural modeling predicted these hydrogen bonds to be disrupted in the N280S (right panel) and N280T (not shown) mutations which occur in autologous CH505 escape mutants. (B) Alignment of CH235.7 and CH235.9 through CH235.13 VH amino acid sequences to CH236 VH. CH235.9 aa mutations expressed as recombinant IgG and tested for neutralization of CH505 TF loop D mutants are shown in red. Asterisks indicate points of contact with gp120 derived from the CH235 crystal structure in complex with gp120 Env.

[0109] FIGS. 52A-B show CH505 gp120 Env Quasi-species Selected as Optimized Immunogens to Induce Both CH235 and CH103-like bnAbs, related to FIGS. 46A-B. (A) Heatmap of the binding data of selected CH235 and CH103 lineage members to the CH505 Env glycoproteins selected to be used as immunogens. Individual Env clone names and weeks of isolation are shown on the left. (B) Affinity of gHgL of 1B2530, 8ANC131, VRC01, VRC-PG04 and VRC-CH31 to a panel of 15 heterologous gp120 envelope glycoproteins.

[0110] FIG. 53 shows characteristics of the V(D)J rearrangements of key CH235 lineage antibodies. Related to FIGS. 41A-B.

[0111] FIG. 54 shows a summary of the Breadth and Potency of Antibody Neutralization Against 199 HIV-1 Env-Pseudoviruses. Related to FIGS. 41A-B.

[0112] FIG. 55 shows Crystallographic Data Collection and Refinement Statistics. Related to FIGS. 42A-E.

[0113] FIGS. 56A-C show sequence Similarity Between VH1-2 and VH1-46 Broadly Neutralizing Antibodies and Mutability of Germline Genes. Related to FIGS. 43A-C. (A) The probability of a conforming VH1-46 antibody with x V_{H} mutations, having c common mutation positions with a reference antibody were estimated based on 100,000 simulated events, with the likelihood of each residue being mutated based on uniform distribution (position) (P_{uniform}), or the mutation frequency at each residue position derived from the VH1-46 antibodies (P_{VH1-46}). (B) The probability of a conforming VH1-46 antibody with x V_{H} mutations, having i identical mutations with a reference antibody were estimated based on 100,000 simulated events, with the likelihood of each residue being mutated based on uniform distribution (position and mutation type) (P_{uniform}), or the mutation frequency at each residue position derived from the VH1-46 antibodies (P_{VH1-46}). (C) Pearson correlation coefficients of positional somatic mutation frequency between VH1-46, VH1-2 and three others.

[0114] FIGS. 57A-B show CH235 Lineage and CH106 Monoclonal Antibodies Cross-Blocking. Related to FIGS. 44A-D. (A) CH235 lineage antibodies blocking of sCD4 and CH106 binding to CH505 TF gp120 and B.63521 gp120 Envs. Results expressed as IC50 ug/ml. nb=no blocking. (B) Monoclonal antibody CH106 blocking of CH235 lineage antibodies to CH505 TF gp120. Results expressed as IC50 ug/ml. nb=no blocking.

[0115] FIG. 58 shows CH235 lineage autologous neutralization. Related to FIGS. 45A-C.

[0116] FIG. 59 shows CH235 lineage antibodies and CH235.9 mutants neutralization of CH505 TF loop D mutant viruses. Related to FIGS. 45A-C.

[0117] FIG. 60 shows binding of antibodies in the CH235 and CH103 lineages to CH505 autologous Env glycoproteins, Related to FIGS. 46A-B.

[0118] FIG. 61 shows stabilization of chimeric CH505 TF SOSIP gp140. The introduction of a cysteine at positions 201 and 433 formed a disulfide bond that stabilized the trimer in the pre-CD4 bound conformation (Nat Struct Mol Biol. 2015 July; 22(7): 522-531). This mutation was also added to further stabilize the CH505 chimeric SOSIP.

[0119] FIG. 62 shows CH505 SOSIP.I binds to trimer-specific bnAbs. The chimeric CH505 TF SOSIP.I was produced and tested for binding to trimer specific bnAbs. In SPR assays, CH505 bound both PGT145 and PGT151.

[0120] FIG. 63 shows SOSIP.I—stabilization of the trimer to reduce CD4 binding also disrupts binding by the CH103 lineage. When the UCA of the CH103 lineage or a mature bnAb from the lineage CH106 was assessed for binding to the CH505 TF SOSIP.I neither antibody bound to the trimer. In contrast the CD4 mimicking antibody VRC01 was still able to bind.

[0121] FIG. 64 shows CH103 UCA binds the CH505 transmitted founder gp120. The monomeric CH505 TF gp120 binds to the CH103 UCA by SPR as shown in the box.

[0122] FIG. 65 shows CH505 TF SOSIP.II—removal of the DS mutations to improve CD4bs Ab binding. To test whether the DS stabilizing mutations disrupted CH103 UCA binding, since they were reported to decrease CD4 binding, the cysteine mutations were reverted back to the alanine and isoleucine present in the wildtype virus. The antigenicity of these trimers, called SOSIP.II, was tested.

[0123] FIG. 66 shows removal of the disulfide stabilizing bond improves UCA binding. A summary of the binding of first SOSIP design called SOSIP.I for comparison to the SOSIP.II proteins is shown. The binding is heat mapped where the darker the color the stronger the binding in BLI experiments. Identical to the first SOSIP design, PGT151 and PGT145 bound to the SOSIP.II design relatively strongly indicating trimer formation. The CH103 lineage antibodies were also able to in bind the SOSIP.II version of the chimeric CH505 trimer. This design still had the V3 loop exposed and at least a portion of the trimers were in a CD4 bound conformation as indicated by 19B and 17B binding.

[0124] FIG. 67 shows CH505 TF chimeric SOSIP.III—introduction of two stabilizing mutation to reduce V3 exposure. Two mutations that reduced V3 exposure in nonchimeric SOSIPs were tested to see if these mutations could function similarly in the chimeric SOSIP design.

[0125] FIG. 68 shows CH505 TF chimeric SOSIP.III forms trimeric envelope and binds the CH103 UCA. The two mutations were introduced and the ability of this protein to form trimers was assessed by PGT151 binding and by negative stain EM. As shown on the left this protein bound to the trimer specific bnAb PGT151, and the protein formed a trimer as shown in the negative stain EM on the right.

[0126] FIG. 69 shows CH103 UCA binds to the CH505 TF SOSIP.III. When binding of the SOSIP.III was assessed and compared to the CH505 TF gp120, it was observed that the off-rate for the CH103 UCA was 10-fold better for the trimer which resulted in an approved affinity for the timer compared to the gp120.

[0127] FIG. 70 shows affinity maturation to the TF SOSIPv4.1 correlates with neutralization potency. The binding of the members of the CH103 lineage to the CCH505 TF was assessed. A positive correlation between affinity for the CH505 TF SOSIP.III was found, shown here on the y-axis and bottom row of the table and neutralization potency against the CH505 TF virus shown here on the x-axis and in the table. As antibodies affinity matured and could bind more strongly to the CH505 TF trimer, they also were able to neutralize the CH505 virus more potently.

[0128] FIG. 71 shows the CH103 mature bnAb engages each protomer of the CH505 TF SOSIP.III. The high affinity of the CH103 mature antibodies for these trimers provided an opportunity to study the stoichiometry of the interaction of the bnAb CH103 and its autologous Envelope. The unliganded trimer formed trimers and upon incubating it with CH103 Fab three CH103 Fabs were observed indicated by the arrows bound to each trimer. Thus the CH103 and gp140 had a 1 to 1 ratio for binding.

[0129] FIG. 72 shows rational design to improve the antigenicity of CH505 TF trimers. The SOSIP.III had the desired antigenicity for the CH103 lineage of antibodies. Its antigenicity on a larger panel of bnAbs was assessed. It bound to bnAbs but unlike the SOSIP.II it did not bind to 19B or 17B.

[0130] FIG. 73 shows CH505 Envs from sequential viruses form stable trimers as chimeric SOSIP.II and III.

[0131] This approach has been employed to multiple CH505 Env sequences in order to make sequential vaccination regimens. A 4-valent vaccination regimen of SOSIP.II was made. The same 4-valent vaccine was made using the SOSIP.III design. A 6-valent vaccine can be made. Trimers to were analyzed for glycosylation and disulfide bond analysis and the Envs have the expected glycosylation and lack aberrant disulfide bonds.

[0132] FIG. 74 shows the chimeric SOSIP.III design is applicable to diverse viruses. This design can be extrapolated to Envs that are not from the CH505 infected individual. Envs from clade C or AE or a group M consensus have all been used and form stable trimers using this design. This highlights the general applicability of this trimer design.

### DETAILED DESCRIPTION OF THE INVENTION

[0133] The development of a safe, highly efficacious prophylactic HIV-1 vaccine is of paramount importance for the control and prevention of HIV-1 infection. A major goal of HIV-1 vaccine development is the induction of broadly neutralizing antibodies (bnAbs) (Immunol. Rev. 254: 225-244, 2013). BnAbs are protective in rhesus macaques against SHIV challenge, but as yet, are not induced by current vaccines.

[0134] For the past 25 years, the HIV vaccine development field has used single or prime boost heterologous Envs as immunogens, but to date has not found a regimen to induce high levels of bnAbs.

[0135] Recently, a new paradigm for design of strategies for induction of broadly neutralizing antibodies was introduced, that of B cell lineage immunogen design (Nature Biotech. 30: 423, 2012) in which the induction of bnAb lineages is recreated. It was recently demonstrated the power of mapping the co-evolution of bnAbs and founder virus for elucidating the Env evolution pathways that lead to bnAb induction (Nature 496: 469, 2013). From this type of work has come the hypothesis that bnAb induction will require a selection of antigens to recreate the “swarms” of sequentially evolved viruses that occur in the setting of bnAb generation in vivo in HIV infection (Nature 496: 469, 2013).

[0136] A critical question is why the CH505 immunogens are better than other immunogens. This rationale comes from three recent observations. First, a series of immunizations of single putatively “optimized” or “native” trimers when used as an immunogen have not induced bnAbs as single immunogens. Second, in all the chronically infected individuals who do develop bnAbs, they develop them in plasma after ˜2 years. When these individuals have been studied at the time soon after transmission, they do not make bnAbs immediately. Third, now that individual's virus and bnAb co-evolution has been mapped from the time of transmission to the development of bnAbs, the identification of the specific Envs that lead to bnAb development have been identified-thus taking the guess work out of envelope choice.

[0137] Two other considerations are important. The first is that for the CH103 bnAb CD4 binding site lineage, the VH4-59 and Vλ3-1 genes are common as are the VDJ, VJ recombinations of the lineage (Liao, Nature 496: 469, 2013). In addition, the bnAb sites are so unusual, we are finding that the same VH and VL usage is recurring in multiple individuals. Thus, we can expect the CH505 Envs to induce CD4 binding site antibodies in many different individuals.

[0138] Regarding the choice of gp120 vs. gp160, for the genetic immunization we would normally not even consider not using gp160. However, in acute infection, gp41 non-neutralizing antibodies are dominant and overwhelm gp120 responses (Tomaras, G et al. J. Virol. 82: 12449, 2008; Liao, H X et al. JEM 208: 2237, 2011). Recently we have found that the HVTN 505 DNA prime, rAd5 vaccine trial that utilized gp140 as an immunogen, also had the dominant response of non-neutralizing gp41 antibodies. Thus, we will evaluate early on the use of gp160 vs gp120 for gp41 dominance.

[0139] In certain aspects the invention provides a strategy for induction of bnAbs is to select and develop immunogens and combinations designed to recreate the antigenic evolution of Envs that occur when bnAbs do develop in the context of infection.

[0140] That broadly neutralizing antibodies (bnAbs) occur in nearly all sera from chronically infected HIV-1 subjects suggests anyone can develop some bnAb response if exposed to immunogens via vaccination. Working back from mature bnAbs through intermediates enabled understanding their development from the unmutated ancestor, and showed that antigenic diversity preceded the development of population breadth. See Liao et al. (2013) Nature 496, 469-476. In this study, an individual “CH505” was followed from HIV-1 transmission to development of broadly neutralizing antibodies. This individual developed antibodies targeted to CD4 binding site on gp120. In this individual the virus was sequenced over time, and broadly neutralizing antibody clonal lineage (“CH103”) was isolated by antigen-specific B cell sorts, memory B cell culture, and amplified by VH/VL next generation pyrosequencing. The CH103 lineage began by binding the T/F virus, autologous neutralization evolved through somatic mutation and affinity maturation, escape from neutralization drove rapid (clearly by 20 weeks) accumulation of variation in the epitope, antibody breadth followed this viral diversification.

[0141] Further analysis of envelopes and antibodies from the CH505 individual indicated that a non-CH103 Lineage (DH235) participates in driving CH103-BnAb induction. See Gao et al. (2014) Cell 158:481-491. For example V1 loop, V5 loop and CD4 binding site loop mutations escape from CH103 and are driven by CH103 lineage. Loop D mutations enhanced neutralization by CH103 lineage and are driven by another lineage. Transmitted/founder Env, or another early envelope for example W004.26, triggers naïve B cell with CH103 Unmutated Common Ancestor (UCA) which develop in to intermediate antibodies. Transmitted/founder Env, or another early envelope for example W004.26, also triggers non-CH103 autologous neutralizing Abs that drive loop D mutations in Env that have enhanced binding to intermediate and mature CH103 antibodies and drive remainder of the lineage. In certain embodiments, the inventive composition and methods also comprise loop D mutant envelopes (e.g. but not limited to M10, M11, M19, M20, M21, M5, M6, M7, M8, M9) as immunogens. In certain embodiments, the D-loop mutants are included in an inventive composition used to induce an immune response in a subject. In certain embodiments, the D-loop mutants are included in a composition used as a prime.

[0142] The invention provides various methods to choose a subset of viral variants, including but not limited to envelopes, to investigate the role of antigenic diversity in serial samples. In other aspects, the invention provides compositions comprising viral variants, for example but not limited to envelopes, selected based on various criteria as described herein to be used as immunogens. In some embodiments, the immunogens are selected based on the envelope binding to the UCA, and/or intermediate antibodies. In some embodiments the immunogens are selected based on their chronological appearance and/or sequence diversity during infection.

[0143] In other aspects, the invention provides immunization strategies using the selections of immunogens to induce cross-reactive neutralizing antibodies. In certain aspects, the immunization strategies as described herein are referred to as “swarm” immunizations to reflect that multiple envelopes are used to induce immune responses. The multiple envelopes in a swarm could be combined in various immunization protocols of priming and boosting. Immune responses, including B cell and T cell responses, could be measured by any suitable assay and criteria, such as but non limited plasma neutralization, plasma binding to vaccine and/or heterologous envelopes and/or viruses could be measured.

[0144] In certain embodiments the invention provides that sites losing the ancestral, transmitted-founder (T/F) state are most likely under positive selection. From acute, homogenous infections with 3-5 years of follow-up, identified herein are sites of interest among plasma single genome analysis (SGA) Envs by comparing the proportion of sequences per time-point in the T/F state with a threshold, typically 5%. Sites with T/F frequencies below threshold are putative escapes. We then selected clones with representative escape mutations. Where more information was available, such as tree-corrected neutralization signatures and antibody contacts from co-crystal structure, additional sites of interest were considered.

[0145] Co-evolution of a broadly neutralizing HIV-1 antibody (CH103) and founder virus was previously reported in African donor (CH505). See Liao et al. (2013) Nature 496, 469-476. In CH505, which had an early antibody that bound autologous T/F virus, we studied 398 envs from 14 time-points over three years (median per sample: 25, range: 18-53). We found 36 sites with T/F frequencies under 20% in any sample. Neutralization and structure data identified 28 and 22 interesting sites, respectively. Together, six gp41 and 53 gp120 sites were identified, plus six V1 or V5 insertions not in HXB2.

[0146] The invention provides an approach to select reagents for neutralization assays and subsequently investigate affinity maturation, autologous neutralization, and the transition to heterologous neutralization and breadth. Given the sustained coevolution of immunity and escape this antigen selection based on antibody and antigen coevolution has specific implications for selection of immunogens for vaccine design.

[0147] In one embodiment, five envelopes were selected that represent envelope antigenic diversity. In another embodiment, six envelopes were selected that represent envelope antigenic diversity. In another embodiment, ten envelopes were selected that represent envelope antigenic diversity. These sets of envelopes represent antigenic diversity by deliberate inclusion of polymorphisms that result from immune selection by neutralizing antibodies. These selections represent various levels of antigenic diversity in the HIV-1 envelope. In some embodiments the selections are based on the genetic diversity of longitudinally sampled SGA envelopes. In some embodiments the selections are based on antigenic and or neutralization diversity. In some embodiments the selections are based on the genetic diversity of longitudinally sampled SGA envelopes, and correlated with other factors such as antigenic/neutralization diversity, and antibody coevolution.

[0148] Sequences/Clones

[0149] Described herein are nucleic and amino acids sequences of HIV-1 envelopes. The sequences for use as immunogens are in any suitable form. In certain embodiments, the described HIV-1 envelope sequences are gp160s. In certain embodiments, the described HIV-1 envelope sequences are gp120s. Other sequences, for example but not limited to stable SOSIP trimer designs, gp145s, gp140s, both cleaved and uncleaved, gp140 Envs with the deletion of the cleavage (C) site, fusion (F) and immunodominant (I) region in gp41—named as gp140ΔCFI (gp140CFI), gp140 Envs with the deletion of only the cleavage (C) site and fusion (F) domain—named as gp140ΔCF (gp140CF), gp140 Envs with the deletion of only the cleavage (C)—named gp140ΔC (gp140C) (See e.g. Liao et al. Virology 2006, 353, 268-282), gp150s, gp41s, which are readily derived from the nucleic acid and amino acid gp160 sequences. In certain embodiments the nucleic acid sequences are codon optimized for optimal expression in a host cell, for example a mammalian cell, a rBCG cell or any other suitable expression system.

[0150] An HIV-1 envelope has various structurally defined fragments/forms: gp160; gp140—including cleaved gp140 and uncleaved gp140 (gp140C), gp140CF, or gp140CFI; gp120 and gp41. A skilled artisan appreciates that these fragments/forms are defined not necessarily by their crystal structure, but by their design and bounds within the full length of the gp160 envelope. While the specific consecutive amino acid sequences of envelopes from different strains are different, the bounds and design of these forms are well known and characterized in the art.

[0151] For example, it is well known in the art that during its transport to the cell surface, the gp160 polypeptide is processed and proteolytically cleaved to gp120 and gp41 proteins. Cleavages of gp160 to gp120 and gp41 occurs at a conserved cleavage site “REKR.” See Chakrabarti et al. Journal of Virology vol. 76, pp. 5357-5368 (2002) see for example FIG. 1, and Second paragraph in the Introduction on p. 5357; Binley et al. Journal of Virology vol. 76, pp. 2606-2616 (2002) for example at Abstract; Gao et al. Journal of Virology vol. 79, pp. 1154-1163 (2005); Liao et al. Virology vol. 353(2): 268-282 (2006).

[0152] The role of the furin cleavage site was well understood both in terms of improving cleave efficiency, see Binley et al. supra, and eliminating cleavage, see Bosch and Pawlita, Virology 64 (5):2337-2344 (1990); Guo et al. Virology 174: 217-224 (1990); McCune et al. Cell 53:55-67 (1988); Liao et al. J Virol. April; 87(8):4185-201 (2013).

[0153] Likewise, the design of gp140 envelope forms is also well known in the art, along with the various specific changes which give rise to the gp140C (uncleaved envelope), gp140CF and gp140CFI forms. Envelope gp140 forms are designed by introducing a stop codon within the gp41 sequence. See Chakrabarti et al. at FIG. 1.

[0154] Envelope gp140C refers to a gp140 HIV-1 envelope design with a functional deletion of the cleavage (C) site, so that the gp140 envelope is not cleaved at the furin cleavage site. The specification describes cleaved and uncleaved forms, and various furin cleavage site modifications that prevent envelope cleavage are known in the art. In some embodiments of the gp140C form, two of the R residues in and near the furin cleavage site are changed to E, e.g., RRVVEREKR is changed to ERVVEREKE, and is one example of an uncleaved gp140 form. Another example is the gp140C form which has the REKR site changed to SEKS. See supra for references.

[0155] Envelope gp140CF refers to a gp140 HIV-1 envelope design with a deletion of the cleavage (C) site and fusion (F) region. Envelope gp140CFI refers to a gp140 HIV-1 envelope design with a deletion of the cleavage (C) site, fusion (F) and immunodominant (I) region in gp41. See Chakrabarti et al. Journal of Virology vol. 76, pp. 5357-5368 (2002) see for example FIG. 1, and Second paragraph in the Introduction on p. 5357; Binley et al. Journal of Virology vol. 76, pp. 2606-2616 (2002) for example at Abstract; Gao et al. Journal of Virology vol. 79, pp. 1154-1163 (2005); Liao et al. Virology vol. 353(2): 268-282 (2006).

[0156] In certain embodiments, the envelope design in accordance with the present invention involves deletion of residues (e.g., 5-11, 5, 6, 7, 8, 9, 10, or 11 amino acids) at the N-terminus. For delta N-terminal design, amino acid residues ranging from 4 residues or even fewer to 14 residues or even more are deleted. These residues are between the maturation (signal peptide, usually ending with CX, X can be any amino acid) and “VPVXXXX . . . ”. In case of CH505 T/F Env as an example, 8 amino acids (italicized and underlined in the below sequence) were deleted:

MRVMGIQRNYPQWWIWSMLGFWMLMICNGMWVTVYYGVPVWKEAKTTLFC
ASDAKAYEKEVHNVWATHACVPTDPNPQE . . .
(rest of envelope sequence is indicated as
“. . .”).

In other embodiments, the delta N-design described for CH505 T/F envelope can be used to make delta N-designs of other CH505 envelopes. In certain embodiments, the invention relates generally to an immunogen, gp160, gp120 or gp140, without an N-terminal Herpes Simplex gD tag substituted for amino acids of the N-terminus of gp120, with an HIV leader sequence (or other leader sequence), and without the original about 4 to about 25, for example 4, 5, 6, 7, 8, 9, 10, 11, 12, 13, 14, 15, 16, 17, 18, 19, 20, 21, 22, 23, 24, 25 amino acids of the N-terminus of the envelope (e.g. gp120). See WO2013/006688, e.g. at pages 10-12, the contents of which publication is hereby incorporated by reference in its entirety.

[0157] The general strategy of deletion of N-terminal amino acids of envelopes results in proteins, for example gp120s, expressed in mammalian cells that are primarily monomeric, as opposed to dimeric, and, therefore, solves the production and scalability problem of commercial gp120 Env vaccine production. In other embodiments, the amino acid deletions at the N-terminus result in increased immunogenicity of the envelopes.

[0158] In certain embodiments, the invention provides envelope sequences, amino acid sequences and the corresponding nucleic acids, and in which the V3 loop is substituted with the following V3 loop sequence TRPNNNTRKSIRIGPGQTFY ATGDIIGNIRQAH. This substitution of the V3 loop reduced product cleavage and improves protein yield during recombinant protein production in CHO cells.

[0159] In certain embodiments, the CH505 envelopes will have added certain amino acids to enhance binding of various broad neutralizing antibodies. Such modifications could include but not limited to, mutations at W680G or modification of glycan sites for enhanced neutralization.

[0160] In certain aspects, the invention provides composition and methods which use a selection of sequential CH505 Envs, as gp120s, gp 140s cleaved and uncleaved, gp145s, gp150s and gp160s, stabilized and/or multimerized trimers, as proteins, DNAs, RNAs, or any combination thereof, administered as primes and boosts to elicit immune response. Sequential CH505 Envs as proteins would be co-administered with nucleic acid vectors containing Envs to amplify antibody induction. In certain embodiments, the compositions and methods include any immunogenic HIV-1 sequences to give the best coverage for T cell help and cytotoxic T cell induction. In certain embodiments, the compositions and methods include mosaic and/or consensus HIV-1 genes to give the best coverage for T cell help and cytotoxic T cell induction. In certain embodiments, the compositions and methods include mosaic group M and/or consensus genes to give the best coverage for T cell help and cytotoxic T cell induction. In some embodiments, the mosaic genes are any suitable gene from the HIV-1 genome. In some embodiments, the mosaic genes are Env genes, Gag genes, Pol genes, Nef genes, or any combination thereof. See e.g. U.S. Pat. No. 7,951,377. In some embodiments the mosaic genes are bivalent mosaics. In some embodiments the mosaic genes are trivalent. In some embodiments, the mosaic genes are administered in a suitable vector with each immunization with Env gene inserts in a suitable vector and/or as a protein. In some embodiments, the mosaic genes, for example as bivalent mosaic Gag group M consensus genes, are administered in a suitable vector, for example but not limited to HSV2, would be administered with each immunization with Env gene inserts in a suitable vector, for example but not limited to HSV-2.

[0161] In certain aspects the invention provides compositions and methods of Env genetic immunization either alone or with Env proteins to recreate the swarms of evolved viruses that have led to bnAb induction. Nucleotide-based vaccines offer a flexible vector format to immunize against virtually any protein antigen. Currently, two types of genetic vaccination are available for testing—DNAs and mRNAs.

[0162] In certain aspects the invention contemplates using immunogenic compositions wherein immunogens are delivered as DNA. See Graham B S, Enama M E, Nason M C, Gordon I J, Peel S A, et al. (2013) DNA Vaccine Delivered by a Needle-Free Injection Device Improves Potency of Priming for Antibody and CD8+ T-Cell Responses after rAd5 Boost in a Randomized Clinical Trial. PLoS ONE 8(4): e59340, page 9. Various technologies for delivery of nucleic acids, as DNA and/or RNA, so as to elicit immune response, both T-cell and humoral responses, are known in the art and are under developments. In certain embodiments, DNA can be delivered as naked DNA. In certain embodiments, DNA is formulated for delivery by a gene gun. In certain embodiments, DNA is administered by electroporation, or by a needle-free injection technologies, for example but not limited to Biojector® device. In certain embodiments, the DNA is inserted in vectors. The DNA is delivered using a suitable vector for expression in mammalian cells. In certain embodiments the nucleic acids encoding the envelopes are optimized for expression. In certain embodiments DNA is optimized, e.g. codon optimized, for expression. In certain embodiments the nucleic acids are optimized for expression in vectors and/or in mammalian cells. In non-limiting embodiments these are bacterially derived vectors, adenovirus based vectors, rAdenovirus (e.g. Barouch D H, et al. Nature Med. 16: 319-23, 2010), recombinant mycobacteria (e.g. rBCG or M smegmatis) (Yu, J S et al. Clinical Vaccine Immunol. 14: 886-093, 2007; ibid 13: 1204-11, 2006), and recombinant vaccinia type of vectors (Santra S. Nature Med. 16: 324-8, 2010), for example but not limited to ALVAC, replicating (Kibler K V et al., PLoS One 6: e25674, 2011 Nov. 9.) and non-replicating (Perreau M et al. J. virology 85: 9854-62, 2011) NYVAC, modified vaccinia Ankara (MVA)), adeno-associated virus, Venezuelan equine encephalitis (VEE) replicons, Herpes Simplex Virus vectors, and other suitable vectors.

[0163] In certain aspects the invention contemplates using immunogenic compositions wherein immunogens are delivered as DNA or RNA in suitable formulations. Various technologies which contemplate using DNA or RNA, or may use complexes of nucleic acid molecules and other entities to be used in immunization. In certain embodiments, DNA or RNA is administered as nanoparticles consisting of low dose antigen-encoding DNA formulated with a block copolymer (amphiphilic block copolymer 704). See Cany et al., Journal of Hepatology 2011 vol. 54 j 115-121; Arnaoty et al., Chapter 17 in Yves Bigot (ed.), Mobile Genetic Elements: Protocols and Genomic Applications, Methods in Molecular Biology, vol. 859, pp 293-305 (2012); Arnaoty et al. (2013) Mol Genet Genomics. 2013 August; 288(7-8):347-63. Nanocarrier technologies called Nanotaxi® for immunogenic macromolecules (DNA, RNA, Protein) delivery are under development. See for example technologies developed by incellart.

[0164] In certain aspects the invention contemplates using immunogenic compositions wherein immunogens are delivered as recombinant proteins. Various methods for production and purification of recombinant proteins, including trimers such as but not limited to SOSIP based trimers, suitable for use in immunization are known in the art. In certain embodiments recombinant proteins are produced in CHO cells.

[0165] The immunogenic envelopes can also be administered as a protein boost in combination with a variety of nucleic acid envelope primes (e.g., HIV-1 Envs delivered as DNA expressed in viral or bacterial vectors).

[0166] Dosing of proteins and nucleic acids can be readily determined by a skilled artisan. A single dose of nucleic acid can range from a few nanograms (ng) to a few micrograms (μg) or milligram of a single immunogenic nucleic acid. Recombinant protein dose can range from a few μg micrograms to a few hundred micrograms, or milligrams of a single immunogenic polypeptide.

[0167] Administration: The compositions can be formulated with appropriate carriers using known techniques to yield compositions suitable for various routes of administration. In certain embodiments the compositions are delivered via intramascular (IM), via subcutaneous, via intravenous, via nasal, via mucosal routes, or any other suitable route of immunization.

[0168] The compositions can be formulated with appropriate carriers and adjuvants using techniques to yield compositions suitable for immunization. The compositions can include an adjuvant, such as, for example but not limited to, alum, poly IC, MF-59 or other squalene-based adjuvant, ASOIB, or other liposomal based adjuvant suitable for protein or nucleic acid immunization. In certain embodiments, the adjuvant is GSK AS01E adjuvant containing MPL and QS21. This adjuvant has been shown by GSK to be as potent as the similar adjuvant AS01B but to be less reactogenic using HBsAg as vaccine antigen [Leroux-Roels et al., IABS Conference, April 2013]. In certain embodiments, TLR agonists are used as adjuvants. In other embodiment, adjuvants which break immune tolerance are included in the immunogenic compositions.

[0169] In certain embodiments, the compositions and methods comprise any suitable agent or immune modulation which could modulate mechanisms of host immune tolerance and release of the induced antibodies. In non-limiting embodiments modulation includes PD-1 blockade; T regulatory cell depletion; CD40L hyperstimulation; soluble antigen administration, wherein the soluble antigen is designed such that the soluble agent eliminates B cells targeting dominant epitopes, or a combination thereof. In certain embodiments, an immunomodulatory agent is administered in at time and in an amount sufficient for transient modulation of the subject's immune response so as to induce an immune response which comprises broad neutralizing antibodies against HIV-1 envelope. Non-limiting examples of such agents is any one of the agents described herein: e.g. chloroquine (CQ), PTP1B Inhibitor-CAS 765317-72-4—Calbiochem or MSI 1436 clodronate or any other bisphosphonate; a Foxol inhibitor, e.g. 344355|Foxol Inhibitor, AS1842856—Calbiochem; Gleevac, anti-CD25 antibody, anti-CCR4 Ab, an agent which binds to a B cell receptor for a dominant HIV-1 envelope epitope, or any combination thereof. In non-limiting embodiments, the modulation includes administering an anti-CTLA4 antibody. Non-limiting examples are ipilimumab and tremelimumab. In certain embodiments, the methods comprise administering a second immunomodulatory agent, wherein the second and first immunomodulatory agents are different.

[0170] There are various host mechanisms that control bNAbs. For example highly somatically mutated antibodies become autoreactive and/or less fit (Immunity 8: 751, 1998; PloS Comp. Biol. 6 e1000800, 2010; J. Thoret. Biol. 164:37, 1993); Polyreactive/autoreactive naïve B cell receptors (unmutated common ancestors of clonal lineages) can lead to deletion of Ab precursors (Nature 373: 252, 1995; PNAS 107: 181, 2010; J. Immunol. 187: 3785, 2011); Abs with long HCDR3 can be limited by tolerance deletion (JI 162: 6060, 1999; JCI 108: 879, 2001). BnAb knock-in mouse models are providing insights into the various mechanisms of tolerance control of MPER BnAb induction (deletion, anergy, receptor editing). Other variations of tolerance control likely will be operative in limiting BnAbs with long HCDR3s, high levels of somatic hypermutations.

[0171] Various antibodies names are used throughout the application. Below is listing of antibodies names correlation: CH490=CH235.6; CH491=CH235.7; CH492=CH235.8; CH493=CH235.9; CH555=CH235.10; CH556=CH235.11; CH557=CH235.12

TABLE 1
Summary of CH505 proteins and sequences. (1) See WO2014042669
(FIG. 17).

| | | gp120 | | chim.6R.SOSIP.664 | chim.6R.DS.SOSIP.664 | CHIM.6R.SOSIP.664V4.1 | CHIM.- |
|---|---|---|---|---|---|---|---|
| | gp160 | delta8 | gp145 | (SOSIP.I) | (SIOSIP.I) | (SOSIP.III) | 6R.SOSIP.664V4.2 |
| CH505 TF aa | (1) | (1) | | FIG. 23A | FIG. 23A | FIG. 23A | FIG. 23A |
| One | (1) | (1) | | | | | |
| embodiment | | | | | | | |
| of a nucleic | | | | | | | |
| acid | | | | | | | |
| W53.16 | (1) | (1) | | FIG. 23A | FIG. 23A | FIG. 23A | FIG. 23A |
| One | (1) | (1) | | | | | |
| embodiment | | | | | | | |
| of a nucleic | | | | | | | |
| acid | | | | | | | |
| W78.33 | (1) | (1) | | | | FIG. 23A | FIG. 23A |
| One | (1) | (1) | | | | | |
| embodiment | | | | | | | |
| of a nucleic | | | | | | | |
| acid | | | | | | | |
| W100.B6 | (1) | (1) | | | | FIG. 23A | FIG. 23A |
| One | (1) | (1) | | | | | |
| embodiment | | | | | | | |
| of a nucleic | | | | | | | |
| acid | | | | | | | |
| M5 aa | FIG. 17B | FIG. | FIG. 19A | | | FIG. 23A | FIG. 23A |
| | | 17A | | | | | |
| One | | | | | | | |
| embodiment | | | | | | | |
| of a nucleic | | | | | | | |
| acid | | | | | | | |
| M11 aa | FIG. 17B | FIG. | FIG. 19A | | | FIG. 23A | FIG. 23A |
| | | 19A | | | | | |
| One | | | | | | | |
| embodiment | | | | | | | |
| of a nucleic | | | | | | | |
| acid | | | | | | | |
| W20.14 aa | FIG. 17B | FIG. | FIG. 19A | | | FIG. 23A | FIG. 23A |
| | | 19A | | | | | |
| One | | | | | | | |
| embodiment | | | | | | | |
| of a nucleic | | | | | | | |
| acid | | | | | | | |
| W30.20 aa | FIG. 17B | FIG. | FIG. 19A | | | FIG. 23A | FIG. 23A |
| | | 19A | | | | | |
| One | | | | | | | |
| embodiment | | | | | | | |
| of a nucleic | | | | | | | |
| acid | | | | | | | |
| W30.12 aa | FIG. 17B | FIG. | FIG. 19A | | | FIG. 23A | FIG. 23A |
| | | 19A | | | | | |
| One | | | | | | | |
| embodiment | | | | | | | |
| of a nucleic | | | | | | | |
| acid | | | | | | | |
| W136.B18 aa | FIG. 19B | FIG. | FIG. 19A | | | FIG. 23A | FIG. 23A |
| | | 19A | | | | | |
| One | | | | | | | |
| embodiment | | | | | | | |
| of a nucleic | | | | | | | |
| acid | | | | | | | |
| W30.25 aa | FIG. 17A | | | | | FIG. 23A | FIG. 23A |
| One | FIG. 17B | | | | | | |
| embodiment | | | | | | | |
| of a nucleic | | | | | | | |
| acid | | | | | | | |
| W053.25 aa | FIG. 17A | | | | | FIG. 23A | FIG. 23A |
| One | FIG. 17B | | | | | | |
| embodiment | | | | | | | |
| of a nucleic | | | | | | | |
| acid | | | | | | | |
| W053.29 aa | FIG. 17A | | | | | FIG. 23A | FIG. 23A |
| One | FIG. 17B | | | | | | |
| embodiment | | | | | | | |
| of a nucleic | | | | | | | |
| acid | | | | | | | |

[0172] It is readily understood that the envelope glycoproteins referenced in various examples and figures comprise a signal/leader sequence. It is well known in the art that HIV-1 envelope glycoprotein is a secretory protein with a signal or leader peptide sequence that is removed during processing and recombinant expression (without removal of the signal peptide, the protein is not secreted). See for example Li et al. Control of expression, glycosylation, and secretion of HIV-1 gp120 by homologous and heterologous signal sequences. Virology 204(1):266-78 (1994) (“Li et al. 1994”), at first paragraph, and Li et al. Effects of inefficient cleavage of the signal sequence of HIV-1 gp120 on its association with calnexin, folding, and intracellular transport. PNAS 93:9606-9611 (1996) (“Li et al. 1996”), at 9609. Any suitable signal sequence could be used. In some embodiments the leader sequence is the endogenous leader sequence. Most of the gp120 and gp160 amino acid sequences include the endogenous leader sequence. In other non-limiting examples the leaders sequence is human Tissue Plasminogen Activator (TPA) sequence, human CD5 leader sequence (e.g. MPMGSLQPLATLYLLGMLVASVLA). Most of the chimeric designs include CD5 leader sequence. A skilled artisan appreciates that when used as immunogens, and for example when recombinantly produced, the amino acid sequences of these proteins do not comprise the leader peptide sequences.

[0173] Nomenclature for trimers: chim.6R.DS.SOSIP.664 is SOSIP.I CHIM.6R.SOSIP.664 is SOSIP.II; CHIM.6R.SOSIP.664V4.1 is SOSIP.III.

[0174] The invention is described in the following non-limiting examples.

### EXAMPLES

### Example 1

[0175] HIV-1 sequences, including envelopes, and antibodies from HIV-1 infected individual CH505 were isolated as described in Liao et al. (2013) Nature 496, 469-476 including supplementary materials; See also Gao et al. (2014) Cell 158:481-491.

[0176] Recombinant HIV-1 Proteins

[0177] HIV-1 Env genes for subtype B, 63521, subtype C, 1086, and subtype CRF_01, 427299, as well as subtype C, CH505 autologous transmitted/founder Env were obtained from acutely infected HIV-1 subjects by single genome amplification, codon-optimized by using the codon usage of highly expressed human housekeeping genes, de novo synthesized (GeneScript) as gp140 or gp120 (AE.427299) and cloned into a mammalian expression plasmid pcDNA3.1/hygromycin (Invitrogen). Recombinant Env glycoproteins were produced in 293F cells cultured in serum-free medium and transfected with the HIV-1 gp140- or gp120-expressing pcDNA3.1 plasmids, purified from the supernatants of transfected 293F cells by using Galanthus nivalis lectin-agarose (Vector Labs) column chromatography, and stored at −80° C. Select Env proteins made as CH505 transmitted/founder Env were further purified by superose 6 column chromatography to trimeric forms, and used in binding assays that showed similar results as with the lectin-purified oligomers.

[0178] ELISA

[0179] Binding of patient plasma antibodies and CH103, and DH235(CH235), See Gao et al. (2014) Cell 158:481-491, clonal lineage antibodies to autologous and heterologous HIV-1 Env proteins was measured by ELISA as described previously. Plasma samples in serial threefold dilutions starting at 1:30 to 1:521, 4470 or purified monoclonal antibodies in serial threefold dilutions starting at 100 μg ml-1 to 0.000 μg ml-1 diluted in PBS were assayed for binding to autologous and heterologous HIV-1 Env proteins. Binding of biotin-labelled CH103 at the subsaturating concentration was assayed for cross-competition by unlabeled HIV-1 antibodies and soluble CD4-Ig in serial fourfold dilutions starting at 10 μg ml-1. The half-maximal effective concentration (EC50) of plasma samples and monoclonal antibodies to HIV-1 Env proteins were determined and expressed as either the reciprocal dilution of the plasma samples or concentration of monoclonal antibodies.

[0180] Surface Plasmon Resonance Affinity and Kinetics Measurements

[0181] Binding Kd and rate constant (association rate (Ka)) measurements of monoclonal antibodies and all candidate UCAs to the autologous Env C. CH05 gp140 and/or the heterologous Env B.63521 gp120 are carried out on BIAcore 3000 instruments as described previously. Anti-human IgG Fc antibody (Sigma Chemicals) is immobilized on a CM5 sensor chip to about 15,000 response units and each antibody is captured to about 50-200 response units on three individual flow cells for replicate analysis, in addition to having one flow cell captured with the control Synagis (anti-RSV) monoclonal antibody on the same sensor chip. Double referencing for each monoclonal antibody—HIV-1 Env binding interactions is used to subtract nonspecific binding and signal drift of the Env proteins to the control surface and blank buffer flow, respectively. Antibody capture level on the sensor surface is optimized for each monoclonal antibody to minimize rebinding and any associated avidity effects. C.CH505 Env gp140 protein is injected at concentrations ranging from 2 to 25 μg ml-1, and B.63521 gp120 was injected at 50-400 μg ml-1 for UCAs and early intermediates IA8 and IA4, 10-100 μg ml-1 for intermediate IA3, and 1-25 μg ml-1 for the distal and mature monoclonal antibodies. All curve-fitting analyses are performed using global fit of to the 1:1 Langmuir model and are representative of at least three measurements. All data analysis was performed using the BIAevaluation 4.1 analysis software (GE Healthcare).

[0182] Neutralization Assays

[0183] Neutralizing antibody assays in TZM-bl cells are performed as described previously. Neutralizing activity of plasma samples in eight serial threefold dilutions starting at 1:20 dilution and for recombinant monoclonal antibodies in eight serial threefold dilutions starting at 50 μg ml-1 are tested against autologous and herologous HIV-1 Env-pseudotyped viruses in TZM-bl-based neutralization assays using the methods known in the art. Neutralization breadth of CH103 is determined using a panel of 196 of geographically and genetically diverse Env-pseudoviruses representing the major circulated genetic subtypes and circulating recombinant forms. HIV-1 subtype robustness is derived from the analysis of HIV-1 clades over time. The data are calculated as a reduction in luminescence units compared with control wells, and reported as IC50 in either reciprocal dilution for plasma samples or in micrograms per microlitre for monoclonal antibodies.

[0184] The GenBank accession numbers for 292 CH505 Env proteins are KC247375-KC247667, and accessions for 459 V_{H}DJ_{H} and 174 WE sequences of antibody members in the CH103 clonal lineage are KC575845-KC576303 and KC576304-KC576477, respectively.

### Example 2

[0185] Binding of sequential envelopes to CH103 and CH235 CD4 binding site bnAb lineages members.

[0186] The binding assay was an ELISA with the envelope protein bound to the well surface of a 96 well plate, and the antibody in questions incubated with the envelope bound to the plate. After washing, an enzyme-labeled anti-human IgG antibody was added and after incubation, washed away. The intensity of binding was determined by the intensity of enzyme-activated color in the well.

TABLE 2
ELISA binding, log-transformed area under the curve (AUC) values for a
realization with four Env-derived gp120 antigens, assayed against members of the CH103
bnAb lineage from universal ancestor (UCA), through intermediate ancestors (IA8-IA1) to
the mature bnAb. Values of 0 indicate no binding. The transmitted-founder (TF) antigen
was derived from Env w004.3.

| Antigen | UCA | IA8 | IA7 | IA6 | IA4 | IA3 | CH105 | IA2 | CH104 | IA1 | CH106 | CH103 |
|---|---|---|---|---|---|---|---|---|---|---|---|---|
| TF | 3.5 | 5.5 | 9.2 | 9.1 | 10.1 | 11 | 11.2 | 10.8 | 10.4 | 10.4 | 11.3 | 12.6 |
| w053.16 | 0 | 0 | 0 | 0 | 0.2 | 1.1 | 9 | 9.3 | 9.9 | 8.8 | 9.8 | 11.6 |
| w078.33 | 0 | 0 | 0 | 0 | 0 | 0 | 8.9 | 9 | 9 | 8.2 | 9.5 | 11.1 |
| w100.B6 | 0 | 0 | 0 | 0 | 0 | 0 | 11 | 12.1 | 11 | 12.2 | 11.8 | 7.1 |

TABLE 3
ELISA binding, log-transformed area under the curve (AUC) values for a
realization with five Env-derived gp120 antigens, assayed against members of the CH103
bnAb lineage from universal ancestor (UCA), through intermediate ancestors (IA8-IA1) to
the mature bnAb. Values of 0 indicate no binding. Antigen names beginning with M were
synthesized by site-directed mutagenesis.

| Antigen | UCA | IA8 | IA7 | IA6 | IA4 | IA3 | CH105 | IA2 | CH104 | IA1 | CH106 | CH103 |
|---|---|---|---|---|---|---|---|---|---|---|---|---|
| M11 | 2.6 | 6.2 | 10.1 | 10 | 10.5 | 11.8 | 11.7 | 12.7 | 12 | 12.2 | 12.8 | 13.4 |
| M5 | 0 | 0.6 | 2.3 | 3.3 | 3.8 | 6.8 | 8.6 | 7.8 | 9 | 7 | 8.4 | 9.8 |
| w020.14 | 0.3 | 3.4 | 7.2 | 7.9 | 8.6 | 9.5 | 10.4 | 11 | 10.4 | 10.3 | 11.2 | 12.6 |
| w030.28 | 0 | 1.6 | 3.5 | 6.3 | 6.5 | 7.7 | 9.1 | 11.1 | 10.7 | 10.1 | 11.7 | 12.8 |
| w078.15 | 0 | 0 | 0.7 | 1 | 1.3 | 3 | 10.1 | 11.5 | 10.8 | 10.9 | 11 | 10.7 |
| w053.31 | 0 | 0 | 0 | 0 | 0 | 0 | 13.5 | 13.3 | 13.7 | 13.4 | 13.4 | 13.6 |

TABLE 4
ELISA binding, log-transformed area under the curve (AUC) values for a
realization with five Env-derived gp120 antigens, assayed against members of the DH235
(CH235) bnAb helper lineage from universal ancestor (UCA), through intermediate
ancestors (I4-I1) to mature bnAbs. Values of 0 indicate no binding. Antigen names
beginning with M were synthesized by site-directed mutagenesis.

| Antigen | UCA | I4 | I3 | I2 | I1 | DH235 | CH236 | CH239 | CH240 | CH241 |
|---|---|---|---|---|---|---|---|---|---|---|
| M11 | 0 | 0 | 0 | 0 | 2.8 | 7.6 | 1.4 | 1.4 | 0.5 | 9.7 |
| M5 | 0.2 | 1.4 | 7 | 6.9 | 9.2 | 11.4 | 7.3 | 12.9 | 7.4 | 14.5 |
| w020.14 | 0 | 0 | 2.7 | 1.2 | 6.5 | 9.9 | 6.7 | 9 | 3.8 | 13.1 |
| w030.28 | 0 | 0 | 0 | 0 | 2.4 | 6.7 | 1.5 | 3.6 | 0.3 | 9.6 |
| w078.15 | 0 | 0 | 0 | 0 | 0 | 0 | 0 | 0 | 0 | 0 |
| w053.31 | 0 | 0 | 0 | 0 | 0 | 1.1 | 0 | 0 | 0 | 1.4 |

TABLE 5
ELISA binding, log-transformed area under the curve (AUC) values for a
realization that embodies ten Env-derived gp120 antigens, assayed against members of the
CH103 bnAb lineage from universal ancestor (UCA), through intermediate ancestors (IA8-
IA1) to the mature bnAb. Values of 0 indicate no binding. Antigen names beginning with M
were synthesized by site-directed mutagenesis.

| Antigen | UCA | IA8 | IA7 | IA6 | IA4 | IA3 | CH105 | IA2 | CH104 | IA1 | CH106 | CH103 |
|---|---|---|---|---|---|---|---|---|---|---|---|---|
| M11 | 2.6 | 6.2 | 10.1 | 10 | 10.5 | 11.8 | 11.7 | 12.7 | 12 | 12.2 | 12.8 | 13.4 |
| M5 | 0 | 0.6 | 2.3 | 3.3 | 3.8 | 6.8 | 8.6 | 7.8 | 9 | 7 | 8.4 | 9.8 |
| w020.14 | 0.3 | 3.4 | 7.2 | 7.9 | 8.6 | 9.5 | 10.4 | 11 | 10.4 | 10.3 | 11.2 | 12.6 |
| w030.28 | 0 | 1.6 | 3.5 | 6.3 | 6.5 | 7.7 | 9.1 | 11.1 | 10.7 | 10.1 | 11.7 | 12.8 |
| w078.15 | 0 | 0 | 0.7 | 1 | 1.3 | 3 | 10.1 | 11.5 | 10.8 | 10.9 | 11 | 10.7 |
| w053.16 | 0 | 0 | 0 | 0 | 0.2 | 1.1 | 9 | 9.3 | 9.9 | 8.8 | 9.8 | 11.6 |
| w030.21 | 0 | 0 | 0 | 0 | 0 | 0 | 10.6 | 11.5 | 11.3 | 11.8 | 10.9 | 12.2 |
| w078.33 | 0 | 0 | 0 | 0 | 0 | 0 | 8.9 | 9 | 9 | 8.2 | 9.5 | 11.1 |
| w100.B6 | 0 | 0 | 0 | 0 | 0 | 0 | 11 | 12.1 | 11 | 12.2 | 11.8 | 7.1 |
| w053.31 | 0 | 0 | 0 | 0 | 0 | 0 | 13.5 | 13.3 | 13.7 | 13.4 | 13.4 | 13.6 |

### Example 3

[0187] Combinations of Antigens Derived from CH505 Envelope Sequences for Swarm Immunizations

[0188] Provided herein are non-limiting examples of combinations of antigens derived from CH505 envelope sequences for a swarm immunization. Without limitations, these selected combinations comprise envelopes which provide representation of the sequence and antigenic diversity of the HIV-1 envelope variants which lead to the induction and maturation of the CH103 and CH235 antibody lineages. The identification of bnAb lineage (CH103) and envelopes which bind preferentially to various members of this lineage provides a direct strategy for the selection of Envs (out of millions possible envelopes naturally occurring in an HIV-1 infected individual) that might have engaged UCA and participated in bnAb development, and thus could serve as immunogens in a vaccine formulation. The identification of helper lineage (CH235) and envelopes which bind preferentially to various members this lineage provides a direct strategy for the selection of Envs (out of millions possible envelopes naturally occurring in an HIV-1 infected individual) that might have engaged UCA and participated in bnAb development, and thus could serve as immunogens in a vaccine formulation.

[0189] The selection includes priming with a virus which binds to the UCA, for example a T/F virus or another early (e.g. but not limited to week 004.3, or 004.26) virus envelope. In certain embodiments the prime could include D-loop variants. In certain embodiments the boost could include D-loop variants. In certain embodiments, these D-loop variants are envelope escape mutants not recognized by the UCA. Non-limiting examples of such D-loop variants are envelopes designated as M10, M11, M19, M20, M21, M5, M6, M7, M8, M9, M14 (TF_M14), M24 (TF_24), M15, M16, M17, M18, M22, M23, M24, M25, M26. See Gao et al. (2014) Cell 158:481-491.

[0190] Non-limiting embodiments of envelopes selected for swarm vaccination are shown as the selections described below. A skilled artisan would appreciate that a vaccination protocol can include a sequential immunization starting with the “prime” envelope(s) and followed by sequential boosts, which include individual envelopes or combination of envelopes. In another vaccination protocol, the sequential immunization starts with the “prime” envelope(s) and is followed with boosts of cumulative prime and/or boost envelopes. In certain embodiments, the sequential immunization starts with the “prime” envelope(s) and is followed by boost(s) with all or various combinations of the envelopes in the selection. In certain embodiments, the prime does not include T/F sequence (W000.TF). In certain embodiments, the prime includes w004.03 envelope. In certain embodiments, the prime includes w004.26 envelope. In certain embodiment the prime includes M11. In certain embodiments the prime includes M5. In certain embodiments, the immunization methods do not include immunization with HIV-1 envelope T/F. In certain embodiments, the immunization methods do not include a schedule of four valent immunization with HIV-1 envelopes T/F, w053.16, w078.33, and w100.B6.

[0191] In certain embodiments, there is some variance in the immunization regimen; in some embodiments, the selection of HIV-1 envelopes may be grouped in various combinations of primes and boosts, either as nucleic acids, proteins, or combinations thereof

[0192] In certain embodiments the immunization includes a prime administered as DNA, and MVA boosts. See Goepfert, et al. 2014; “Specificity and 6-Month Durability of Immune Responses Induced by DNA and Recombinant Modified Vaccinia Ankara Vaccines Expressing HIV-1 Virus-Like Particles” J Infect Dis. 2014 Feb. 9. [Epub ahead of print].

[0193] HIV-1 Envelope selection A (five envelopes): M11; w020.14; w030.28; w078.15; w053.31

[0194] HIV-1 Envelope selection B (six envelopes): M11; M5; w020.14; w030.28; w078.15; w053.31

[0195] HIV-1 Envelope selection C (ten envelopes): M11; M5; w020.14; w030.28; w078.15; w053.16; w030.21; w078.33; w100.B6; w053.31.

[0196] HIV-1 Envelopes selection D (six envelopes): M5, M11, 20.14, 30.28, 30.23, 136.B18.

[0197] HIV-1 Envelopes selection E (six envelopes): M5, M11, 20.14, 30.20, 30.23, 136.B18.

[0198] HIV-1 Envelopes selection F (six envelopes—P186 study): M5, M11, 20.14, 30.20, 30.12, 136.B18.

[0199] HIV-1 envelope selection G (EnvSeq-2): M5, 30.25; 53.25; 53.29.

[0200] HIV-1 envelope selection H (EnvSeq-3): M5, 30.20; 20.14, 30.12.

[0201] Selections using M5 as a prime, e.g. but not limited to D, E, F, G or H are expected to engage receptors and drive progression of CH235 lineage of antibodies.

[0202] The selections of CH505-Envs were down-selected from a series of 400 CH505 Envs isolated by single-genome amplification followed for 3 years after acute infection, based on experimental data. The enhanced neutralization breadth that developed in the CD4-binding site (bs) CH103 antibody lineage that arose in subject CH505 developed in conjunction with epitope diversification in the CH505's viral quasispecies. It was observed that at 6 months post-infection there was more diversification in the CD4bs epitope region in this donor than sixteen other acutely infected donors. Population breadth did not arise in the CH103 antibody lineage until the epitope began to diversify. A hypothesis is that the CH103 linage drove viral escape, but then the antibody adapted to the relatively resistant viral variants. As this series of events was repeated, the emerging antibodies evolved to tolerate greater levels of diversity in relevant sites, and began to be able to recognize and neutralize diverse heterologous forms for the virus and manifest population breadth. In certain embodiments, six envs are selected from CH505 sequences to reflect diverse variants for making Env pseudoviruses, with the goal of recapitulating CH505 HIV-1 antigenic diversity over time, making sure selected site (i.e. those sites reflecting major antigenic shifts) diversity was represented.

[0203] Specifically, for CH505 the virus and envelope evolution were mapped, and the CH103 CD4 binding-site bnAb evolution. In addition, 135 CH505 varied envelope pseudotyped viruses were made and tested them for neutralization sensitivity by members of the CH103 bnAb lineage (e.g, FIG. 3). From this large dataset, in one embodiment, six Env variants were chosen for immunization based on sequence diversity, and antigenic diversity, for example binding to antibodies in the CH103 and/or CH235 lineage (Tables 3-5).

[0204] In certain embodiments, the envelopes are selected based on Env mutants with sites under diversifying selection, in which the transmitted/founder (T/F) Env form vanished below 20% in any sample, i.e. escape variants; signature sites based on autologous neutralization data, i.e. Envs with statistically supported signatures for escape from members of the CH103 bnAb lineage; and sites with mutations at the contact sites of the CH103 antibody and HIV Env. In this manner, a sequential swarm of Envs was selected for immunization to represent the progression of virus escape mutants that evolved during bnAb induction and increasing neutralization breadth in the CH505 donor.

[0205] In certain embodiments, additional sequences are selected to contain five additional specific amino acid signatures of resistance that were identified at the global population level. These sequences contain statistically defined resistance signatures, which are common at the population level and enriched among heterologous viruses that CH103 fails to neutralize. When they were introduced into the TF sequence, they were experimentally shown to confer partial resistance to antibodies in the CH103 lineage. Following the reasoning that serial viral escape and antibody adaptation to escape is what ultimate selects for neutralizing antibodies that exhibit breadth and potency against diverse variants, in certain embodiments, inclusion of these variants in a vaccine may extend the breadth of vaccine-elicited antibodies even beyond that of the CH103 lineage. Thus the overarching goal will be to trigger a CH103-like lineage first using the CH505TF modified M11, that is well recognized by early CH103 ancestral states, then vaccinating with antigenic variants, to allow the antibody lineage to adapt through somatic mutation to accommodate the natural variants that arose in CH505. In certain embodiments, vaccination regimens include a total of five sequences (Selection A) that capture the antigenic diversity of CH505. In another embodiment, additional antigenic diversity is added (Selection B and C), to enable the induction of antibodies by vaccination that may have even greater breadth than those antibodies isolated from CH505.

[0206] In some embodiments, the CH505 sequences that represent the accumulation of viral sequence and antigenic diversity in the CD4bs epitope of CH103 in subject CH505 are represented by selection A, selection B, or selection C.

[0207] M11 is a mutant generated to include two mutations in the loop D (N279D+V281G relative to the TF sequence) that enhanced binding to the CH103 lineage. These were early escape mutations for another CD4bs autologous neutralizing antibody lineage, but might have served to promote early expansion of the CH103 lineage.

[0208] In certain embodiments, the two CH103 resistance signature-mutation sequences added to the antigenic swarm are: M14 (TF with S364P), and M24 (TF with S375H+T202K+L520F+G459E). They confer partial resistance to the TF with respect to the CH103 lineage. In certain embodiments, these D-loop mutants are administered in the boost.

### Example 4

[0209] Immunization protocols in subjects with swarms of HIV-1 envelopes.

[0210] Immunization protocols contemplated by the invention include envelopes sequences as described herein including but not limited to nucleic acids and/or amino acid sequences of gp160s, gp150s, gp145, cleaved and uncleaved gp140s, stabilized trimers, e.g. but not limited to SOSIP trimers, gp120s, gp41s, N-terminal deletion variants as described herein, cleavage resistant variants as described herein, or codon optimized sequences thereof. A skilled artisan can readily modify the gp160 and gp120 sequences described herein to obtain these envelope variants. The swarm immunization selections can be administered in any subject, for example monkeys, mice, guinea pigs, or human subjects.

[0211] In non-limiting embodiments, the immunization includes a nucleic acid which is administered as DNA, for example in a modified vaccinia vector (MVA). In non-limiting embodiments, the nucleic acids encode gp160 envelopes. In other embodiments, the nucleic acids encode gp120 envelopes. In other embodiments, the boost comprises a recombinant gp120 envelope. The vaccination protocols include envelopes formulated in a suitable carrier and/or adjuvant, for example but not limited to alum. In certain embodiments the immunizations include a prime, as a nucleic acid or a recombinant protein, followed by a boost, as a nucleic acid or a recombinant protein. A skilled artisan can readily determine the number of boosts and intervals between boosts.

[0212] In some embodiments, the immunization methods comprise immunization prime with a nucleic acid, for example but not limited to priming two times with DNA. In some embodiments the nucleic acid prime is administered one, two, three or four times. In some embodiments the two DNA prime is administered via electroporation (DNA-EP). In some embodiments, the primer and boost is administered as RNA. The primes are followed by boost with sequential envelopes. The boosting envelopes could be in any suitable form, e.g. but not limited to gp140s, as soluble or stabilized SOSIP trimers.

[0213] Table 6 shows a non-limiting example of an immunization protocol using a selection of HIV-1 envelopes

| Envelope | Prime | Boost(s) | Boost(s) | Boost(s) |
|---|---|---|---|---|
| M11 | M11 as a | | | |
| | nucleic acid e.g. | | | |
| | DNA/MVA vector | | | |
| | and/or protein | | | |
| W020.14 | | W020.14 as a | | |
| | | nucleic acid e.g. | | |
| | | DNA/MVA | | |
| | | and/or protein | | |
| W030.28 | | | W030.28 as | |
| | | | nucleic acid e.g. | |
| | | | DNA/MVA | |
| | | | and/or protein | |
| W078.15 | | | w078.15 as | |
| | | | nucleic acid e.g. | |
| | | | DNA/MVA | |
| | | | and/or protein | |
| W100.B6 | | | | W100.B6 as |
| | | | | nucleic acid e.g. |
| | | | | DNA/MVA |
| | | | | and/or protein |

[0214] Table 7 shows a non-limiting example of an immunization protocol using a selection of HIV-1 envelopes

| Envelope | Prime | Boost(s) | Boost(s) | Boost(s) |
|---|---|---|---|---|
| M11 | M11 as a | M11 as a | M11 as a | M11 as a |
| | nucleic acid e.g. | nucleic acid e.g. | nucleic acid e.g. | nucleic acid e.g. |
| | DNA/MVA vector | DNA/MVA vector | DNA/MVA vector | DNA/MVA vector |
| | and/or protein | and/or protein | and/or protein | and/or protein |
| W020.14 | | W020.14 as a | W020.14 as a | W020.14 as a |
| | | nucleic acid e.g. | nucleic acid e.g. | nucleic acid e.g. |
| | | DNA/MVA | DNA/MVA | DNA/MVA |
| | | and/or protein | and/or protein | and/or protein |
| W030.28 | | | W030.28 as | W030.28 as |
| | | | nucleic acid e.g. | nucleic acid e.g. |
| | | | DNA/MVA | DNA/MVA |
| | | | and/or protein | and/or protein |
| W078.15 | | | w078.15 as | w078.15 as |
| | | | nucleic acid e.g. | nucleic acid e.g. |
| | | | DNA/MVA | DNA/MVA |
| | | | and/or protein | and/or protein |
| W100.B6 | | | | W100.B6 as |
| | | | | nucleic acid e.g. |
| | | | | DNA/MVA |
| | | | | and/or protein |

[0215] In certain embodiments, after administering a prime with M11, subsequent immunizations include all other envelopes as nucleic acids and/or proteins.

[0216] Table 8 shows a non-limiting example of an immunization protocol using a swarm of HIV-1 envelopes

| Envelope | Prime | Prime/Boost | Boost(s) | Boost(s) | Boost(s) |
|---|---|---|---|---|---|
| M11 | M11 as a | | | | |
| | nucleic acid e.g. | | | | |
| | DNA/MVA vector | | | | |
| | and/or protein | | | | |
| M5 | | M5 as a | | | |
| | | nucleic acid e.g. | | | |
| | | DNA/MVA | | | |
| | | and/or protein | | | |
| W020.14 | | | W020.14 as a | | |
| | | | nucleic acid e.g. | | |
| | | | DNA/MVA | | |
| | | | and/or protein | | |
| W030.28 | | | | W030.28 as | |
| | | | | nucleic acid e.g. | |
| | | | | DNA/MVA | |
| | | | | and/or protein | |
| W078.15 | | | | w078.15 as | |
| | | | | nucleic acid e.g. | |
| | | | | DNA/MVA | |
| | | | | and/or protein | |
| W100.B6 | | | | | W100.B6 as |
| | | | | | nucleic acid e.g. |
| | | | | | DNA/MVA |
| | | | | | and/or protein |

[0217] Table 9 shows a non-limiting example of an immunization protocol using a swarm of HIV-1 envelopes

| Envelope | Prime | Prime/Boost | Boost(s) | Boost(s) | Boost(s) |
|---|---|---|---|---|---|
| M11 | M11 as a | M11 as a | M11 as a | M11 as a | M11 as a |
| | nucleic acid e.g. | nucleic acid e.g. | nucleic acid e.g. | nucleic acid e.g. | nucleic acid e.g. |
| | DNA/MVA vector | DNA/MVA vector | DNA/MVA vector | DNA/MVA vector | DNA/MVA vector |
| | and/or protein | and/or protein | and/or protein | and/or protein | and/or protein |
| M5 | Optionally | M5 as a | M5 as a | M5 as a | M5 as a |
| | M5 as a | nucleic acid e.g. | nucleic acid e.g. | nucleic acid e.g. | nucleic acid e.g. |
| | nucleic acid e.g. | DNA/MVA | DNA/MVA | DNA/MVA | DNA/MVA |
| | DNA/MVA | and/or protein | and/or protein | and/or protein | and/or protein |
| | and/or protein | | | | |
| W020.14 | | | W020.14 as a | W020.14 as a | W020.14 as a |
| | | | nucleic acid e.g. | nucleic acid e.g. | nucleic acid e.g. |
| | | | DNA/MVA | DNA/MVA | DNA/MVA |
| | | | and/or protein | and/or protein | and/or protein |
| W030.28 | | | | W030.28 as | W030.28 as |
| | | | | nucleic acid e.g. | nucleic acid e.g. |
| | | | | DNA/MVA | DNA/MVA |
| | | | | and/or protein | and/or protein |
| W078.15 | | | | w078.15 as | w078.15 as |
| | | | | nucleic acid e.g. | nucleic acid e.g. |
| | | | | DNA/MVA | DNA/MVA |
| | | | | and/or protein | and/or protein |
| W100.B6 | | | | | W100.B6 as |
| | | | | | nucleic acid e.g. |
| | | | | | DNA/MVA |
| | | | | | and/or protein |

[0218] In certain embodiments, after administering a prime with M11 and optionally with M5, subsequent immunizations include all other envelopes as nucleic acids and/or proteins.

[0219] Table 10 shows a non-limiting example of immunization protocol using a selection of ten HIV-1 envelopes

| Envelope | Prime | Prime/Boost | Boost(s) | Boost(s) | Boost(s) | Boost(s) | Boost(s) | Boost(s) | Boost(s) |
|---|---|---|---|---|---|---|---|---|---|
| M11 | M11 as a | | | | | | | | |
| | nucleic | | | | | | | | |
| | acid e.g. | | | | | | | | |
| | DNA/MVA | | | | | | | | |
| | vector | | | | | | | | |
| | and/or | | | | | | | | |
| | protein | | | | | | | | |
| M5 | | M5 | | | | | | | |
| | | as a | | | | | | | |
| | | nucleic | | | | | | | |
| | | acid e.g. | | | | | | | |
| | | DNA/MVA | | | | | | | |
| | | and/or | | | | | | | |
| | | protein | | | | | | | |
| W020.14 | | | W020.14 | | | | | | |
| | | | as a | | | | | | |
| | | | nucleic | | | | | | |
| | | | acid e.g. | | | | | | |
| | | | DNA/MVA | | | | | | |
| | | | and/or | | | | | | |
| | | | protein | | | | | | |
| W030.28 | | | | W030.28 | | | | | |
| | | | | as | | | | | |
| | | | | nucleic | | | | | |
| | | | | acid e.g. | | | | | |
| | | | | DNA/MVA | | | | | |
| | | | | and/or | | | | | |
| | | | | protein | | | | | |
| W078.15 | | | | w078.15 | | | | | |
| | | | | as | | | | | |
| | | | | nucleic | | | | | |
| | | | | acid e.g. | | | | | |
| | | | | DNA/MVA | | | | | |
| | | | | and/or | | | | | |
| | | | | protein | | | | | |
| W053.16 | | | | | W053.16 | | | | |
| | | | | | as | | | | |
| | | | | | nucleic | | | | |
| | | | | | acid e.g. | | | | |
| | | | | | DNA/MVA | | | | |
| | | | | | and/or | | | | |
| | | | | | protein | | | | |
| W030.21 | | | | | | W030.21 | | | |
| | | | | | | as | | | |
| | | | | | | nucleic | | | |
| | | | | | | acid e.g. | | | |
| | | | | | | DNA/MVA | | | |
| | | | | | | and/or | | | |
| | | | | | | protein | | | |
| W078.33 | | | | | | | W078.33 | | |
| | | | | | | | as | | |
| | | | | | | | nucleic | | |
| | | | | | | | acid e.g. | | |
| | | | | | | | DNA/MVA | | |
| | | | | | | | and/or | | |
| | | | | | | | protein | | |
| W100.B6 | | | | | | | | W100.B6 | |
| | | | | | | | | as | |
| | | | | | | | | nucleic | |
| | | | | | | | | acid e.g. | |
| | | | | | | | | DNA/MVA | |
| | | | | | | | | and/or | |
| | | | | | | | | protein | |
| W053.31 | | | | | | | | | W053.31 |
| | | | | | | | | | as |
| | | | | | | | | | nucleic |
| | | | | | | | | | acid e.g. |
| | | | | | | | | | DNA/MVA |
| | | | | | | | | | and/or |
| | | | | | | | | | protein |

[0220] Table 11 shows a non-limiting example of immunization protocol using a selection of six HIV-1 envelopes

| Envelope | Prime | Prime/Boost | Boost(s) | Boost(s) | Boost(s) |
|---|---|---|---|---|---|
| M11 | M11 as a | M11 as a | M11 as a | M11 as a | M11 as a |
| | nucleic acid e.g. | nucleic acid e.g. | nucleic acid e.g. | nucleic acid e.g. | nucleic acid e.g. |
| | DNA/MVA vector | DNA/MVA vector | DNA/MVA vector | DNA/MVA vector | DNA/MVA vector |
| | and/or protein | and/or protein | and/or protein | and/or protein | and/or protein |
| M5 | Optionally | M5 as a | M5 as a | M5 as a | M5 as a |
| | M5 as a | nucleic acid e.g. | nucleic acid e.g. | nucleic acid e.g. | nucleic acid e.g. |
| | nucleic acid e.g. | DNA/MVA | DNA/MVA | DNA/MVA | DNA/MVA |
| | DNA/MVA | and/or protein | and/or protein | and/or protein | and/or protein |
| | and/or protein | | | | |
| W020.14 | | | W020.14 as a | W020.14 as a | W020.14 as a |
| | | | nucleic acid e.g. | nucleic acid e.g. | nucleic acid e.g. |
| | | | DNA/MVA | DNA/MVA | DNA/MVA |
| | | | and/or protein | and/or protein | and/or protein |
| W030.20 | | | | W030.20 as | W030.20 as |
| | | | | nucleic acid e.g. | nucleic acid e.g. |
| | | | | DNA/MVA | DNA/MVA |
| | | | | and/or protein | and/or protein |
| W030.12 | | | | w030.12 as | w030.12 as |
| | | | | nucleic acid e.g. | nucleic acid e.g. |
| | | | | DNA/MVA | DNA/MVA |
| | | | | and/or protein | and/or protein |
| W136.B18 | | | | | W136.B18 as |
| | | | | | nucleic acid e.g. |
| | | | | | DNA/MVA |
| | | | | | and/or protein |

[0221] Table 12 shows a non-limiting example of immunization protocol using a selection of six HIV-1 envelopes

| Envelope | Prime | Boost(s) | Boost(s) | Boost(s) | Boost(s) |
|---|---|---|---|---|---|
| M11 | M11 as a | | | | |
| | nucleic acid e.g. | | | | |
| | DNA/MVA vector | | | | |
| | and/or protein | | | | |
| M5 | Optionally | | | | |
| | M5 as a | | | | |
| | nucleic acid e.g. | | | | |
| | DNA/MVA | | | | |
| | and/or protein | | | | |
| W020.14 | | W020.14 as a | | | |
| | | nucleic acid e.g. | | | |
| | | DNA/MVA | | | |
| | | and/or protein | | | |
| W030.20 | | | W030.20 as | | |
| | | | nucleic acid e.g. | | |
| | | | DNA/MVA | | |
| | | | and/or protein | | |
| W030.12 | | | | w030.12 as | |
| | | | | nucleic acid e.g. | |
| | | | | DNA/MVA | |
| | | | | and/or protein | |
| W136.B18 | | | | | W136.B18 as |
| | | | | | nucleic acid e.g. |
| | | | | | DNA/MVA |
| | | | | | and/or protein |

[0222] In certain embodiments, after administering a prime with M11 and optionally with M5, subsequent immunizations include sequential or cumulative addition of the other envelopes as nucleic acids and/or proteins.

[0223] Table 13 shows a non-limiting example of immunization protocol using a selection of four HIV-1 envelopes

| Envelope | Prime | Boost(s) | Boost(s) | Boost(s) |
|---|---|---|---|---|
| M5 | M5as a | | | |
| | nucleic acid e.g. | | | |
| | DNA/MVA vector | | | |
| | and/or protein | | | |
| W30.25 | | W30.25 as a | | |
| | | nucleic acid e.g. | | |
| | | DNA/MVA vector | | |
| | | and/or protein | | |
| W53.25 | | | W53.25 as a | |
| | | | nucleic acid e.g. | |
| | | | DNA/MVA vector | |
| | | | and/or protein | |
| W53.29 | | | | W53.29 as a |
| | | | | nucleic acid e.g. |
| | | | | DNA/MVA vector |
| | | | | and/or protein |

[0224] In certain embodiments an immunization protocol could prime with a bivalent or trivalent Gag mosaic (Gag 1 and Gag 2, Gag 1, Gag 2 and Gag3) in a suitable vector.

### Example 5

[0225] Env mixtures of the CH505 virus are expected to induce the beginning of CD4 binding site BnAb lineages CH103 and CH235

[0226] The combinations of envelopes described in Examples 2-4 will be tested in any suitable subject. Suitable animal models include without limitation mice, including humanized mice, guinea pigs, or non-human primates (NHPs). For example an animal is administered with the following antigens, as DNA and/or proteins, in any suitable for, in the following immunization schedule: Prime: loop D mutant M5 and M11. That will give the best CH103 UCA binder (M11) and the best CH235 UCA binder (M5). Immunization 2: week 020.14. Immunization 3: Week 030.28. Immunization 4: week 078.15. Immunization 5: week 100.B6. Immunization 5: swarm of all six envelopes. Adjuvant is a TLR-4 agonist (GLA-synthetic monophosphoryl lipid A) in stable emulsion from Infectious Disease Research Institute, Seattle Wash.

[0227] In another embodiment, the prime is M5 and M11. The boost includes 20.14, 30.20, 30.12, and 136.B18, sequentially or additively.

### Example 5A

[0228] Immunization elicits heterologous and autologous Tier 2 neutralizing antibodies.

[0229] While improved breadth of vaccine-induced neutralizing antibody responses against tier 2 viruses are needed for a protective HIV-1 vaccine, elicitation of bnAbs by vaccination has proven challenging.

[0230] This example shows elicitation of heterologous and autologous tier 2 neutralizing antibodies with sequential Env vaccination in rhesus macaques. See also FIGS. 25-34. The method comprised administering T/F envelope as gp145 DNA via electroporation, followed by boosting with T/F, w053.16, w078.33 and w100.B6 envelopes administered as gp140C envelopes.

[0231] Co-evolution studies of the CH103 lineage of antibodies and viruses from the same infected person CH505 provides a roadmap for how bnAbs develop during natural infection (Liao et al. Nature 2014; Bonsignori et al. Cell 2016).

[0232] This animal study compared the immunogenicity of CH505 gp140C oligomers to CH505-CD40 conjugates. We hypothesize that a roadblock to bnAb induction by vaccination is the lack of B cell stimulation by antigen presenting cells (dendritic cells and monocytes), and that bNAbs, similar to those in the CH103 bnAb lineage, can be induced by vaccination with sequential Envs from CH505 (TF, w053.16, w078.33 and w100.B6). In this experiment the T/F envelope was administered as a DNA prime. In some animals the boosting envelopes (TF, w053.16, w078.33 and w100.B6) were administered as gp140C envelopes. In some animals these envelopes were targeted to antigen presenting cells by a CD40 antibody—human anti-CD40 IgG4 was linked to the CH505 gp140C.

[0233] It is possible that the reduced immunogenicity of the anti-CD40 IgG4-CH505 Env regimen is due to anti-drug antibodies in rhesus macaques.

[0234] This example shows that: DNA-EP prime and gp140C oligomer boosts induced autologous tier 2 neutralization in 1 of 4 macaques; heterologous tier 2 neutralization of 9/12 tier 2 isolates was also elicited in the same macaque.; and that CD4 binding site directed plasma IgG was present in wildtype Env immunized macaques. RSC3-reactive B cells were sorted from macaques and the binding and neutralization screening is ongoing.

[0235] This example demonstrated that sequential Env immunogens, including the sequential immunogens used in this study could induce heterologous Tier 2 neutralizatoin. One alternative to increase the response rate of bnAb induction is the use of sequential near-native soluble CH505 trimers (e.g. but not limited to SOSIP based trimers as described herein). Immunization with CH505 stabilized trimers while modulating immune tolerance with immune checkpoint inhibitors is also underway.

[0236] In some embodiments, the immunization methods could comprise immunization prime with a nucleic acid, for example but not limited to priming two times with DNA, In some embodiments the nucleic acid prime is administered one, two, three or four times. In some embodiments the two DNA prime is administered via electroporation (DNA-EP). In some embodiments the nucleic acid encodes any suitable form of the envelope. In some embodiments, the primer and boost is administered as RNA. The primes are followed by boost with sequential envelopes. The boosting envelopes could be in any suitable form, e.g. but not limited to gp140s, as soluble or stabilized SOSIP trimers, e.g. but not limited to SOSIP.III.

### Example 6

[0237] Over the past five years, the HIV vaccine development field has realized that immunization with a single HIV envelope protein will not be successful at inducing bnAbs^{1,2}. Moreover, with evidence for a role of host immune tolerance control mechanisms in limiting the induction of bnAbs^{1,3}, the biology of bnAbs has begun to be elucidated. The role of the structure of the Env immunogen is undoubtedly important, as the Env must contain sufficiently native bnAb epitopes to bind in optimal affinities to the unmutated common ancestor (UCA, naïve B cell receptors) of bnAb lineages^{2,4}. Thus, the concept of B cell lineage immunogen design has arisen, whereby lineages of bnAbs are elucidated, and Envs chosen for sequential immunizations based on optimized affinity of Env immunogens for BCRs at sequential steps of the affinity maturation pathway of bnAb lineages²

[0238] While Envs have been designed for reacting with UCAs of heterologous bnAb lineages^{4,5}, we have taken the approach of defining, in select HIV-infected individuals who make bnAbs, the natural sequence of Envs that induced the bnAb lineages in order to make immunogen down selection an evidence-based decision. While such immunogens are designed for the UCA and intermediate antibodies of one particular bnAb lineage, they hold promise for inducing bnAb lineages in multiple individuals because of the remarkable conserved usage of VH and VL genes of bnAbs and the restricted nature of antibody motifs for many bnAb types, particularly for the gp41 membrane proximal region⁶, the CD4 binding site⁷ and the V1V2-glycan site^{1,8-10}.

[0239] Two types of CD4 binding site antibodies

[0240] There are several types of CD4 binding site (bs) bnAbs two of which are a) heavy chain complementarity determining region 3 (HCDR3) binders and b) CD4 mimicking bnAbs⁷. HCDR3 binding CD4 binding site bnAbs approach the CD4 binding site with the HCDR3 and other VH and VL loops with multiple loop-based interactions. Several different VHs and VLs are used by HCDR3 binding bnAbs with VH3 and VH4 the most common. In contrast, CD4 mimicking bnAbs have restricted VH usage and either use VH1-2*02 or VH1-46. When VH1-2*02 is used, the light chain LCDR3 must be five amino acids in length. However, when VH1-46 is used, the LCDR3 can be of normal (10-13 aa) in length. Both VH1-2*02 and VH1-46 CD4 mimicking antibodies approach the CD4 binding site in a highly homologous manner to the approach of CD4, and structural analysis of such bnAbs demonstrates both structural similarity to CD4, as well as near identical structures to each of these types of antibodies⁷. Finally, HCDR3 binders are less broad and potent than CD4 mimicking antibodies, with HCDR3 binders neutralizing ˜50% of isolates (e.g., CH103, CH98) while CD4 mimickers neutralizing 90-95% of isolates (e.g., CH235.12, VRC01)⁷. Thus, both types of antibodies are desirable to induce with vaccination as components of a polyclonal bnAb response.

[0241] The CH505 African HIV-infected individual that makes both types of CD4bs bnAbs over 6 years (See Liao et al. (2013) Nature 496, 469-476 including supplementary materials; See also Gao et al. (2014) Cell 158:481-491; Example 8)

[0242] Thus, from African individual CH505, we have isolated both sequential Envs and bnAbs over time, and mapped the co-evolution of two bnAb lineages, the CH103 CD4 binding site HCDR3 binder bnAb lineage¹¹ and the CH235 CD4 mimicking CD4bs VH1-46 bnAb lineage¹². The CH103 HCDR3 binder type of CD4 binding site antibody achieved 55% maximum breadth and 4.5 mcg inhibitory concentration 50 (IC50) neutralization of cross-clade HIVs¹¹. In contrast, the CH235 CD4 mimicking CD4 binding site antibody achieved 90% neutralization and neutralizing IC50 of 0.7 mcg/ml. Here, we will describe the work of development of sequential Env regimens to induce both of these types of bnAb lineages, and propose here the new sequential Envs to specifically initiate CH235-like CD4 mimicking bnAb lineages.

[0243] The EnvSeq-1 Sequential Vaccine from CH505 Designed to Induce HCDR3-Type of CD4 Binding Site bnAbs

[0244] We have developed a 4-valent immunogen comprised of CH505 envelopes that have been designed to trigger the CH103 lineage UCA to clonally expand and start off CH103-like CD4bs HCDR3-binder types of B cell lineages (TF; w053.16; w078.33; w100.B6 the EnvSeq-1 vaccine, see WO2014042669 incorporated by reference in its entirety). In SPR assays, the transmitted/founder (T/F) Env gp120 reacted with the UCA of the CH103 lineage with a KD of −200 nM. Studies in CH103 VH+VL knock-in mice and Rhesus macaques using EnvSeq-1 have been completed and demonstrate proof of concept that sequential CH505 gp120s can initiate bnAb B cell clonal lineages in the setting of vaccination. The EnvSeq-1 vaccine binds to CH103 precursors in CH103 bnAb knock-in mice and can expand them with immunization in adjuvant. In Rhesus macaques, the gp120 EnvSeq-1 vaccine can induce antibodies with the characteristics of precursors of CD4 binding site bnAbs. These characteristics include antibodies that differentially bind CH505 Env but not Env with an isoleucine deletion at aa 371 that disrupts the CD4 binding site, antibodies that use similar VH4 and V13 genes to the human CH103 bnAb, and antibodies that neutralize the tier 1b T/F variant CH505 4.3 as well as some tier 2 viruses.

[0245] Utility of gp120s as Sequential Envs

[0246] Whether a native trimer is needed for this purpose or if a highly antigenic Env subunit will suffice is yet unknown, but studies in mice in basic B cell biology have demonstrated that what is important for B cell survival in the germinal center (GC) is the optimal affinity of the immunogen for the GC B cell receptor (BCR)^{13,14}. A key question is whether gp120 or gp140 trimers are preferred immunogens in a sequential regimen. Emerging data have demonstrated that gp120s or their fragments can engage bnAb UCAs and expand CD4bs bnAb precursors^{5,15,16}. In contrast, recent data with soluble individual trimers have demonstrated that they have only induced autologous tier 2 neutralizing antibodies against glycan-bare spots and not bnAb epitopes^{17,18}. Thus, it is appropriate at this time to continue to study gp120 immunogens in man to test the hypothesis that sequential immunogens can initiate bnAb lineages. Whether boosting later in the immunization sequence with a trimeric Env will be needed will be tested in future studies.

[0247] The EnvSeq-2 Sequential Vaccine from CH505 is Designed to Induce CD4 Mimicking-Type of CD4 Binding Site bnAbs

[0248] In this application we propose to extend the test of sequential Env immunizations in man for initiation of broadly neutralizing antibodies to test in a human Phase I clinical trial of a new series of CH505 Envs (the EnvSeq-2 vaccine) specifically designed to induce a more broad and potent bnAb type, the CH235-like VH1-46 utilizing CD4 mimicking broad neutralizing antibody with 90% breadth and 0.6 mcg/ml inhibitory concentration 50 (IC50).

[0249] Design of a Sequential Immunogen (EnvSeq-2) to Initiate VH1-46 CD4 Mimicking CD4 Binding Site Antibody Lineages

[0250] Provided herein is a new set of immunogens based on the recent work describing the sequence of events that occurred with the development of CD4 mimicking CD4 binding site bnAb lineage, CH235¹².

[0251] From this work, a natural mutant of the CH505 T/F Env called CH505.M5 was found with one amino acid difference than the CH505 T/F strain, i.e., a single N279K change, that occurred very early on after infection; M5 binds to the CH235 UCA (˜0.5 micromolar)³. Thus, M5 is the initiating Env for CD4 mimicking CD4 binding site antibodies in the context of the EnvSeq-2 vaccine.

[0252] Next, a set of 6 mutations at amino acids 97, 275, 278, 279, 281, and 471 in the Env binding site to the CH235 lineage (FIG. 10), that were associated with escape from early CH235 antibody lineage members from autologous CH505 viruses were identified and three additional Envs chosen based on mutations at these sites.

TABLE 14
EnvSeq-2 vaccine and key amino acid mutations as well as V5 length in
vaccine Env gp120 components.

| Vaccine Env | aa97 | aa275 | aa279 | aa281 | aa471 | Env V5 length |
|---|---|---|---|---|---|---|
| CH505 M5 | K | E | T | V | G | 8 |
| CH505 30.25 | K | E | T | A | G | 10 |
| CHO505 53.35 | E | E | T | G | G | 11 |
| CH505 53.29 | K | E | T | A | E | 11 |

[0253] Importantly, the later CH235 antibody lineage members acquired the ability to recognize viruses with these 6 Env mutations, presumably due to the selection imposed by exposure to the resistance mutations in vivo. These late Ch235 antibodies (such as the most potent CH235.12 antibody) had expanded breadth due to selection for recognition of these 6 mutations.

[0254] These chosen Envs in EnvSeq-2 vaccine are not associated with the best binding of the antibodies at intermediate steps as was done for design of the EnvSeq-1 vaccine above. Rather, as the increase in breadth at in the heterologous panel coincided with a gained capacity to recognize resistance mutations, Envs were selected based on their potential to expand CH235 antibody lineage recognition in order to tolerate these 6 key and common neutralization resistance-Env mutations. Nonetheless the selected Envs indeed had capacity to sequentially bind to lineage members (FIG. 20).

[0255] Finally, the fifth hypervariable loop (V5) region length was also a strong signature for recognition of CH505 viruses by CH235 antibodies, and early lineage members could only bind and neutralize short V5s. Longer V5s were selected by the early antibodies, and later antibodies could recognize viruses with longer V5s, which are more representative of the heterologous tier 2 HIV virus population. Thus, a final key criterion for selection of sequential Envs in the EnvSeq-2 vaccine was progressive lengthening of V5 (Table 14). Thus, the EnvSeq-2 Envs are associated with development of heterologous breadth from the CH235 UCA->CH235->CH235.9->CH235.12.

[0256] The EnvSeq-2 set of immunogens are currently begin produced in non-GMP in pre-production runs, and during year 1 of the Staged Vaccine Contract, will be tested in vitro in recombinant protein immunizations in both VH+VL humanized mice and rhesus macaques. In addition, a second set of CH505 immunogens chosen based on affinity of binding to members of the CH235 antibody lineage will be tested in similar immunization studies (a vaccine called EnvSeq-3, FIG. 21).

[0257] The optimal immunogen of the two sets of sequential Envs following comparison of EnvSeq-2 versus EnvSeq-3 will be chosen for GMP production in preclinical studies based on the following criteria:
[0258] a) highest level of induction of memory B cell antibodies that bind to CH505 Env and do not bind to CH505 Env with an isoleucine deletion at amino acid position 371 that disrupts the CD4 binding site (called “differential binding” memory B cells),
[0259] b) no neutralization of the tier 2 CH505 T/F virus (the CH235 UCA does not neutralize the CH505 tier 2 TF virus. However, if the induced antibodies do neutralize the tier 2 TF CH505 virus, then it will be an indication of immunogen driving a CH235 lineage further into lineage maturation).
[0260] c) highest level of neutralization of the tier 1b CH505 T/F variant 4.3,
[0261] d) highest level of heterologous primary HIV strain neutralizing antibodies induced.

[0262] In summary, provided are two selections of CH505 envelopes—FIG. 20 (EnvSeq-2) or FIG. 21(EnvSeq-3)—for use in immunization regimens. In some embodiments these are used as recombinant CH505 Env gp120s (including gp120 delta N)), to be used in sequence following the administration of the CH505 M5 priming Env that binds to the CH235 UCA. In other embodiments these are used in any other suitable form, for example but not limited to stable SOSIP trimer designs, gp145s, gp140s, both cleaved and uncleaved, gp140 Envs with the deletion of the cleavage (C) site, fusion (F) and immunodominant (I) region in gp41—named as gp140ΔCFI (g140CFI), gp140 Envs with the deletion of only the cleavage (C) site and fusion (F) domain—named as gp140ΔCF (gp140CF), gp140 Envs with the deletion of only the cleavage (C)—named gp140ΔC (gp140C) (See e.g. Liao et al. Virology 2006, 353, 268-282), gp150s, gp41s, which are readily derived from the nucleic acid and amino acid gp160 sequences.

### REFERENCES FOR EXAMPLE 6

[0263] 1 Mascola, J. R. & Haynes, B. F. HIV-1 neutralizing antibodies: understanding nature's pathways. Immunological reviews 254, 225-244, doi:10.1111/imr.12075 (2013).
[0264] 2 Haynes, B. F., Kelsoe, G., Harrison, S. C. & Kepler, T. B. B-cell-lineage immunogen design in vaccine development with HIV-1 as a case study. Nature biotechnology 30, 423-433, doi:10.1038/nbt.2197 (2012).
[0265] 3 Haynes, B. F. & Verkoczy, L. AIDS/HIV. Host controls of HIV neutralizing antibodies. Science 344, 588-589, doi:10.1126/science.1254990 (2014).
[0266] 4 Jardine, J. et al. Rational HIV immunogen design to target specific germline B cell receptors. Science 340, 711-716, doi:10.1126/science.1234150 (2013).
[0267] 5 McGuire, A. T. et al. Engineering HIV envelope protein to activate germline B cell receptors of broadly neutralizing anti-CD4 binding site antibodies. The Journal of experimental medicine 210, 655-663, doi:10.1084/jem.20122824 (2013).
[0268] 6 Morris, L. et al. Isolation of a human anti-HIV gp41 membrane proximal region neutralizing antibody by antigen-specific single B cell sorting. PloS one 6, e23532, doi:10.1371/journal.pone.0023532 (2011).
[0269] 7 Zhou, T. et al. Structural Repertoire of HIV-1-Neutralizing Antibodies Targeting the CD4 Supersite in 14 Donors. Cell 161, 1280-1292, doi:10.1016/j.ce11.2015.05.007 (2015).
[0270] 8 Bonsignori, M. et al. Analysis of a clonal lineage of HIV-1 envelope V2/V3 conformational epitope-specific broadly neutralizing antibodies and their inferred unmutated common ancestors. Journal of virology 85, 9998-10009, doi:10.1128/JVI.05045-11 (2011).
[0271] 9 Andrabi, R. et al. Identification of Common Features in Prototype Broadly Neutralizing Antibodies to HIV Envelope V2 Apex to Facilitate Vaccine Design. Immunity 43, 959-973, doi:10.1016/j.immuni.2015.10.014 (2015).
[0272] 10 Gorman, J. et al. Structures of HIV-1 Env V1V2 with broadly neutralizing antibodies reveal commonalities that enable vaccine design. Nature structural & molecular biology 23, 81-90, doi: 10.1038/nsmb.3144 (2016).
[0273] 11 Liao, H. X. et al. Co-evolution of a broadly neutralizing HIV-1 antibody and founder virus. Nature 496, 469-476, doi:10.1038/nature12053 (2013).
[0274] 12 Bonsignori, M. et al. Maturation Pathway from Germline to Broad HIV-1 Neutralizer of a CD4-Mimic Antibody. Cell 165, 449-463, doi:10.1016/j.ce11.2016.02.022 (2016).
[0275] 13 Dal Porto, J. M., Haberman, A. M., Kelsoe, G. & Shlomchik, M. J. Very low affinity B cells form germinal centers, become memory B cells, and participate in secondary immune responses when higher affinity competition is reduced. The Journal of experimental medicine 195, 1215-1221 (2002).
[0276] 14 Shih, T. A., Meffre, E., Roederer, M. & Nussenzweig, M. C. Role of BCR affinity in T cell dependent antibody responses in vivo. Nature immunology 3, 570-575, doi:10.1038/ni803 (2002).
[0277] 15 McGuire, A. T. et al. Specifically modified Env immunogens activate B-cell precursors of broadly neutralizing HIV-1 antibodies in transgenic mice. Nature communications 7, 10618, doi:10.1038/ncomms10618 (2016).
[0278] 16 Jardine, J. G. et al. HIV-1 broadly neutralizing antibody precursor B cells revealed by germline-targeting immunogen. Science 351, 1458-1463, doi:10.1126/science.aad9195 (2016).
[0279] 17 Sanders, R. W. et al. HIV-1 VACCINES. HIV-1 neutralizing antibodies induced by native-like envelope trimers. Science 349, aac4223, doi:10.1126/science.aac4223 (2015).
[0280] 18 Bradley, T. et al. Structural Constraints of Vaccine-Induced Tier-2 Autologous HIV Neutralizing Antibodies Targeting the Receptor-Binding Site. Cell reports 14, 43-54, doi:10.1016/j.celrep.2015.12.017 (2016).

### Example 6A: Vaccine Antigen Design Based on the Evolution of Breadth of the CH235 bNAb Lineage

[0281] Four CH505 Vaccine Candidates Based on the Evolution of Breadth of the CH235 Lineage, Targeting the CD4bs

[0282] The mutant called CH505.M5 is the starting point for identifying CH505 vaccine candidates. CH505.M5 is one amino acid different than the CH505 TF strain, with a single N279K change, that occurred very early and conferred resistance to the cooperating CH103 lineages.

[0283] Identification of Signature Sites in the Contact Surface of the Antibody (<8.5 A)

[0284] Mutational patterns in the signature sites in the contact surface of the antibody are determined (in the global Tier II panel, as well as in our subjects). These sites are related to heterologous and autologous neutralization sensitivity/resistance signatures. The pattern of critical interest is the set of mutations (in this case, 6 positions with mutations that are common in the circulating population) that were associated with a high degree of resistance in the heterologous population to early CH235 lineage members, but that were less restrictive for late lineage members. These amino acids were also associated with a high degree of resistance to early antibodies among CH505's Envs, and so escape in the autologous population. Later lineage members acquired the ability to recognize these mutations, presumably due to the selection imposed by exposure to the resistance mutations in vivo. These late antibodies then had expanded breadth at the population level, presumably due to selection for recognition of these mutations.

[0285] These amino acids are not associated with the best binding of the antibodies at intermediate steps (earlier hypotheses for selecting Envs was to simply pick those that bound best to intermediate linage members). As the increase in breadth in the heterologous panel coincides with a gained capacity to recognize resistance mutations, Envs are picked based on their potential to expand Ab recognition to tolerate common resistance mutations and also to require Envs that had at least some capacity to bind to lineage members, but placing emphasis on covering common signatures, not on highest binders.

[0286] Hypervariable V5 region length was also a strong signature for recognition, and early lineage members could only see short V5's. Longer V5s were selected by the early antibodies, and later antibodies could recognize viruses with longer V5s, which are more representative of the heterologous population.

[0287] The mutations conferring viral escape (or relative resistance) from early lineage antibodies are educating the later antibodies.

[0288] Later antibodies in the lineage gain breadth at the population level because they evolved the capacity to recognize particular resistance conferring amino acids that arose in vivo.

[0289] Envs that are associated with jump in breadth from the UCA->CH235->CH235.9->CH235.12 are defined. The amino acids that are statistically most closely associated with distinct increases in breadth, the heterologous signatures, are identified. These signatures are related back to cycles of escape/recognition in vivo—exposure to these signature amino acids seems to trigger the increase breadth. FIG. 35 shows the heterologous panel heatmap of IC50s for CH235UCA, CH235, CH235.9, CH235.12, and VRC01 for 202 Envs.

[0290] Mutations that are common in the circulating population and are heterologous signatures are shown on the right of FIG. 36. The 207 M group panel is grouped by bNAb sensitivity—antibodies marked with an asterisk are sensitive. Selected based only on CH235 lineage signatures at the population level, the env mutations in subject CH505 are shown in the left of FIG. 36. These contact signature amino acids are enriched among viruses that are resistance to CH235 and CH235.9, and sensitive to CH235.12.

[0291] Envs from CH505 that carried the signature mutations were picked, requiring at least some binding of later antibodies to the antigens and that they carried modest increases in V5 length relative to M5 (FIG. 38). M5 was the best trigger for CH235 like antibodies. Env30.25 gave a gentle nudge towards the most common mutations at the population level, where CH505 TF differed from consensus. An increase in V5 length is present. Env53.25 increase the V5 length, and adds three other relatively common mutations. Env 53.29 adds 471E, that may inhibit CH235.9 binding, but CH235.12 can recognized viruses with 471E. None of the CH235 Envs tested with the E275K mutation bound any of the CH235 lineages, they were not included in the set. As there is no binding data, T278S comes up too late be included in the set.

[0292] Although CH235.12 binds Envs that carry K97E and G471E with low affinity, the differential capacity to recognize heterologous Envs between CH235.9 and CH235.12 is very strongly associated with CH235.12's ability to recognize Envs that have an E in either one of those 2 positions, so including them here may enable selection of antibodies that can recognize these quite common mutations at the population level, that restrict CH235's early lineage member's breadth (FIG. 39).

[0293] A main difference between the choice of CH505 immunogens in FIG. 40 (Selection F) and Selection G is in signature position 97 and 471. These are invariant among these six strains, with K97 and G471. But each has an E among the antigens selected on FIG. 38.

### Example 7: Animal Studies

[0294] The immunogens of the invention, for example Selection F (M5, M11, 20.14, 30.20, 30.12, 136.B18) could be tested in any suitable non-human animal model. Immune responses, including B cell and T cell responses to the vaccine, could be measured by any suitable assay and criteria, such as but non limited plasma neutralization, plasma binding to vaccine and/or heterologous envelopes and/or viruses could be measured. Animals studies with various forms of the selected immunogens are contemplated: gp160 mRNA of M5, M11, 20.14, 30.20, 30.12, 136.B18 (NHP#141), 6-valent M5, M11, 20.14, 30.20, 30.12, 136.B18 as SOSIP trimers (NHP#142), mRNA of 6-valent stabilized SOSIP trimers of M5, M11, 20.14, 30.20, 30.12, 136.B18 (NHP#140), gp145DNA of CH505M5 and CH505M11 as a prime and a subsequence boost(s), followed by 6-valent M5, M11, 20.14, 30.20, 30.12, 136.B18 SOSIP trimers (e.g. NHP#139). In some embodiments the SOSIP trimer is SOSIP v4.1. Any other trimer design is contemplated. Any suitable adjuvant could be used. Studies could be performed in any suitable animal model. Studies could be performed in adults and neonates.

TABLE 15
NHP Study #139: gp145 DNA M5 + M11(x2) + 6-valent 4.1 SOSIP in neonates.

| | | | | Done at |
|---|---|---|---|---|
| Bleed | Receive @ | Instructions | Samples | receiving |
| Date | BIDMC | (I.D. Immunizations) | Qty/Volume Needed | laboratory |
| Wk 0 | Wk 0 | Bleed + Immunize neonates only: | EDTA+ | Freeze |
| | **Prebleed | M5 gp 145 DNA (2 mg) + | +Stool + Rectal | plasma in |
| | Processed | M11 gp 145 DNA (2 mg) | swabs + saliva | 250 uL |
| | at Bioqual | IM | +IDEXX serum | aliquots |
| | | | chems + CBC | *Bioqual to |
| | | | | freeze Wk 0 |
| | | | | samples |
| Wk 2 | Wk 2 | Bleed all animals | EDTA+ | Freeze |
| | | | +Stool + Rectal | plasma in |
| | | | swabs + saliva | 250 uL |
| | | | +IDEXX serum | aliquots |
| | | | chems + CBC | |
| Wk 4 | Wk 4 | Immunize neonates only: | Stool + Rectal | |
| | | M5 gp 145 DNA (2 mg) + | swabs + saliva | |
| | | M11 gp 145 DNA (2 mg) | | |
| | | IM | | |
| Wk 6 | Wk 6 | Bleed all animals | EDTA+ | Freeze |
| | | | +Stool + Rectal | plasma in |
| | | | swabs + saliva | 250 uL |
| | | | +IDEXX serum | aliquots; all |
| | | | chems + CBC | PBMCs |
| Wk 8 | Wk 8 | Immunize neonates only: | Stool + Rectal | |
| | | M5 SOSIP 4.1 stable trimer (25 ug) + | swabs + saliva | |
| | | M11 SOSIP 4.1 stable trimer (25 ug) | | |
| | | In Poly ICLC (Hiltonol) = 200 ug | | |
| | | IM | | |
| Wk 10 | Wk 10 | Bleed all animals | EDTA+ | Freeze |
| | | | +Stool + Rectal | plasma in |
| | | | swabs + saliva | 250 uL |
| | | | +IDEXX serum | aliquots; all |
| | | | chems + CBC | PBMCs |
| Wk 12 | Wk 12 | Immunize neonates only: | Stool + Rectal | |
| | | 20.14 SOSIP 4.1 stable trimer (50 ug) | swabs + saliva | |
| | | In Poly ICLC (Hiltonol) = 200 ug | | |
| | | IM | | |
| Wk 14 | Wk 14 | Bleed all animals | EDTA + SST | Freeze serum |
| | | | +Stool + Rectal | and plasma in |
| | | | swabs + saliva | 250 uL |
| | | | +IDEXX serum | aliquots; all |
| | | | chems + CBC | PBMCs |
| Wk 16 | Wk 16 | Immunize neonates only: | Stool + Rectal | |
| | | 30.20 SOSIP 4.1 stable trimer (50 ug) | swabs + saliva | |
| | | In Poly ICLC (Hiltonol) = 200 ug | | |
| | | IM | | |
| Wk 18 | Wk 18 | Bleed all animals | EDTA + SST | Freeze serum |
| | | | +Stool + Rectal | and plasma in |
| | | | swabs + saliva | 250 uL |
| | | | +IDEXX serum | aliquots; all |
| | | | chems + CBC | PBMCs |
| Wk 20 | Wk 20 | Immunize neonates only: | Stool + Rectal | |
| | | 30.12 SOSIP 4.1 stable trimer | swabs + saliva | |
| | | In Poly ICLC (Hiltonol) = 200 ug | | |
| | | IM | | |
| Wk 22 | Wk 22 | Bleed all animals | EDTA + SST | Freeze serum |
| | | | +Stool + Rectal | and plasma in |
| | | | swabs + saliva | 250 uL |
| | | | +IDEXX serum | aliquots |
| | | | chems + CBC | |
| Wk 24 | Wk 24 | Immunize neonates only: | Stool + Rectal | |
| | | 136.B8 SOSIP 4.1 stable trimer | swabs + saliva | |
| | | In Poly ICLC (Hiltonol) = 200 ug | | |
| | | IM | | |
| Wk 26 | Wk 26 | Bleed all animals | EDTA + SST | Freeze serum |
| | | | +Stool + Rectal | and plasma in |
| | | | swabs + saliva | 250 uL |
| | | | +IDEXX serum | aliquots |
| | | | chems + CBC | |

TABLE 16
NHP study #140: mRNA 6-valent chimeric stabilized 4.1 trimers

| Bleed | Receive @ | Instructions | Samples | Done at |
|---|---|---|---|---|
| Date | BIDMC | (I.D. Immunizations) | Qty/Volume Needed | BIDMC |
| Pre- | Pre- | Pre-LN biopsy (axillary) | 6 ml EDTA + 2 ml | Freeze |
| bleed | bleed | Pre-Bleed all animals and ship to Linh | SST | Plasma and |
| Feb. 22, 2017 | Feb. 23, 2017 | Mach at BIDMC via Fedex priority | +serum chemistry | serum in |
| | | overnight | (IDEXX) + CBC | 250 uL |
| | | NHP's: | (IDEXX) | aliquots; all |
| | | 150796, 150798, 150794, 150252 | | PBMC |
| Wk 0 | Wk 0 | Bleed all animals and immunize: | No | No |
| Feb. 28, 2017 | Feb. 29, 2017 | M5 chimeric stabilized trimer (kos) | sampling | sampling |
| | | mRNA-LNP 50 ug + | | |
| | | M11 chimeric stabilized trimer (kos) | | |
| | | mRNA-LNP 50 ug | | |
| | | ID = 10 sites on the back | | |
| | | Give M5 and M11 separately at different | | |
| | | sites to avoid heterotrimers | | |
| | | mRNA-LNPs: | | |
| | | *diluted in calcium and magnesium free | | |
| | | PBS where needed. | | |
| | | *once thawed are stored on ice and | | |
| | | administered within 2 hours | | |
| | | NHP's: | | |
| | | 150796, 150798, 150794, 150252 | | |
| Wk 1 | Wk 1 | Bleed all animals | 6 ml EDTA + 2 ml | Freeze |
| Mar. 7, 2017 | Mar. 8, 2017 | LN biopsy (inguinal) | SST | Plasma and |
| | | | +serum chemistry | serum in |
| | | | (IDEXX) + CBC | 250 uL |
| | | | (IDEXX) | aliquots; all |
| | | | | PBMC |
| Wk 2 | Wk 2 | Bleed all animals | 6 ml EDTA + 2 ml | Freeze |
| Mar. 14, 2017 | Mar. 15, 2017 | | SST | serum and |
| | | | +serum chemistry | plasma in |
| | | | (IDEXX) + CBC | 250 uL |
| | | | (IDEXX) | aliquots; all |
| | | | | PBMCs |
| Wk 4 | Wk 4 | Bleed all animals and immunize: | 6 ml EDTA + 2 ml | Freeze |
| Mar. 29, 2017 | Mar. 30, 2017 | 20.14 chimeric stabilized trimer (kos) | SST | serum and |
| | | mRNA-LNP 50 ug | +serum chemistry | plasma in |
| | | ID = 10 sites on the back | (IDEXX) + CBC | 250 uL |
| | | | (IDEXX) | aliquots; all |
| | | | | PBMCs |
| Wk 5 | Wk 5 | Bleed all animals | 6 ml EDTA + 2 ml | Freeze |
| Apr. 5, 2017 | Apr. 6, 2017 | LN biopsy (inguinal) | SST | serum and |
| | | | +serum chemistry | plasma in |
| | | | (IDEXX) + CBC | 250 uL |
| | | | (IDEXX) | aliquots; all |
| | | | | PBMCs |
| Wk 6 | Wk 6 | Bleed all animals | 6 ml EDTA + 2 ml | Freeze |
| Apr. 12, 2017 | Apr. 13, 2017 | | SST | serum and |
| | | | +serum chemistry | plasma in |
| | | | (IDEXX) + CBC | 250 uL |
| | | | (IDEXX) | aliquots; all |
| | | | | PBMCs |
| Wk 8 | Wk 8 | Bleed all animals and immunize: | 6 ml EDTA + 2 ml | Freeze |
| Apr. 26, 2017 | Apr. 27, 2017 | 30.20 chimeric stabilized trimer (kos) | SST | serum and |
| | | mRNA-LNP 50 ug | +serum chemistry | plasma in |
| | | ID = 10 sites on the back | (IDEXX) + CBC | 250 uL |
| | | | (IDEXX) | aliquots; all |
| | | | | PBMCs |
| Wk 9 | Wk 9 | Bleed all animals | 6 ml EDTA + 2 ml | Freeze |
| May 3, 2017 | May 4, 2017 | | SST | serum and |
| | | | +serum chemistry | plasma in |
| | | | (IDEXX) + CBC | 250 uL |
| | | | (IDEXX) | aliquots; all |
| | | | | PBMCs |
| Wk 10 | Wk 10 | Bleed all animals | 6 ml EDTA + 2 ml | Freeze |
| May 10, 2017 | May 11, 2017 | | SST | serum and |
| | | | +serum chemistry | plasma in |
| | | | (IDEXX) + CBC | 250 uL |
| | | | (IDEXX) | aliquots; all |
| | | | | PBMCs |
| Wk 12 | Wk 12 | Bleed all animals and immunize: | 6 ml EDTA + 2 ml | Freeze |
| May 24, 2017 | May 25, 2017 | 30.12 chimeric stabilized trimer (kos) | SST | serum and |
| | | mRNA-LNP 50 ug | +serum chemistry | plasma in |
| | | ID = 10 sites on the back | (IDEXX) + CBC | 250 uL |
| | | | (IDEXX) | aliquots; all |
| | | | | PBMCs |
| Wk 13 | Wk 13 | Bleed all animals | 6 ml EDTA + 2 ml | Freeze |
| May 31, 2017 | Jun. 1, 2017 | | SST | serum and |
| | | | +serum chemistry | plasma in |
| | | | (IDEXX) + CBC | 250 uL |
| | | | (IDEXX) | aliquots; all |
| | | | | PBMCs |
| Wk 14 | Wk 14 | Bleed all animals | 6 ml EDTA + 2 ml | Freeze |
| Jun. 7, 2017 | Jun. 8, 2017 | | SST | serum and |
| | | | +serum chemistry | plasma in |
| | | | (IDEXX) + CBC | 250 uL |
| | | | (IDEXX) | aliquots; all |
| | | | | PBMCs |
| Wk 16 | Wk 16 | Bleed all animals and immunize: | 6 ml EDTA + 2 ml | Freeze |
| Jun. 21, 2017 | Jun. 22, 2017 | 136.B18 chimeric stabilized trimer (kos) | SST | serum and |
| | | mRNA-LNP 50 ug | +serum chemistry | plasma in |
| | | ID = 10 sites on the back | (IDEXX) + CBC | 250 uL |
| | | | (IDEXX) | aliquots; all |
| | | | | PBMCs |
| Wk 17 | Wk 17 | Bleed all animals | 6 ml EDTA + 2 ml | Freeze |
| Jun. 28, 2017 | Jun. 29, 2017 | LN biopsy (axillary) | SST | serum and |
| | | | +serum chemistry | plasma in |
| | | | (IDEXX) + CBC | 250 uL |
| | | | (IDEXX) | aliquots; all |
| | | | | PBMCs |
| Wk 18 | Wk 18 | Bleed all animals | 6 ml EDTA + 2 ml | Freeze |
| Jul. 5, 2017 | Jul. 6, 2017 | | SST | serum and |
| | | | +serum chemistry | plasma in |
| | | | (IDEXX) + CBC | 250 uL |
| | | | (IDEXX) | aliquots; all |
| | | | | PBMCs |
| Wk 20 | Wk 20 | Bleed all animals | 6 ml EDTA + 2 ml | Freeze |
| Jul. 19, 2017 | Jul. 20, 2017 | | SST | serum and |
| | | | +serum chemistry | plasma in |
| | | | (IDEXX) + CBC | 250 uL |
| | | | (IDEXX) | aliquots; all |
| | | | | PBMCs |
| Wk 24 | Wk 24 | Bleed all animals | 6 ml EDTA + 2 ml | Freeze |
| Aug. 2, 2017 | Aug. 3, 2017 | | SST | serum and |
| | | | +serum chemistry | plasma in |
| | | | (IDEXX) + CBC | 250 uL |
| | | | (IDEXX) | aliquots; all |
| | | | | PBMCs |
| Wk 28 | Wk 28 | Bleed all animals | 6 ml EDTA + 2 ml | Freeze |
| Aug. 16, 2017 | Aug. 17, 2017 | | SST | serum and |
| | | | +serum chemistry | plasma in |
| | | | (IDEXX) + CBC | 250 uL |
| | | | (IDEXX) | aliquots; all |
| | | | | PBMCs |

[0295] The mRNA immonogens are delivered by a lipid nanoparticle (LNP) technology. The LNPs comprises four different lipids that could self assemble to 80-100 nm size particles.

TABLE 17
NHP Study #141: mRNA 6-valent gp 160 membrane bound trimers

| | | | | Done at |
|---|---|---|---|---|
| Bleed | Receive @ | Instructions | Samples | receiving |
| Date | BIDMC | (I.D. Immunizations) | Qty/Volume Needed | laboratory |
| Wk 0 | Wk 0 | Pre-LN biopsy (axillary) | Pre-LN biopsy | Freeze serum |
| Nov. 9, 2016 | Nov. 10, 2016 | Immunize all 4 animals: | (axillary | and plasma |
| | | 4 NHPs (4 NOTchallenged monkeys | 4 ml EDTA + 2 ml | in 250 uL |
| | | from #129 vaccinated): | SST | aliquots |
| | | 6858(M), 150250(F), 150793(M), | | |
| | | 150795(M) | | |
| | | M5 gp 160 membrane bound trimer | | |
| | | mRNA-LNP 50 ug + | | |
| | | M11 gp 160 membrane bound trimer | | |
| | | mRNA-LNP 50 ug | | |
| | | ID = 60 ul × 10 sites on the back | | |
| | | Give M5 and M11 separately at | | |
| | | different sites to avoid heterotrimers | | |
| | | mRNA-LNPs: | | |
| | | *diluted in calcium and magnesium | | |
| | | free PBS where needed. | | |
| | | *once thawed are stored on ice and | | |
| | | administered within 2 hours | | |
| Wk 1 | Wk 1 | Bleed all animals + Draining lymph | 2 ml EDTA + | Freeze |
| Nov. 16, 2016 | Nov. 17, 2016 | node biopsies (axillary) | Draining lymph | plasma in |
| | | | node biopsies | 250 uL |
| | | | (axillary) | aliquots |
| Wk 2 | Wk 2 | Bleed all animals | 6 ml EDTA + 2 ml | Freeze serum |
| Nov. 21, 2016 | Nov. 22, 2016 | | SST | and plasma |
| | | | | in 250 uL |
| | | | | aliquots; all |
| | | | | PBMCs |
| Wk 4 | Wk 4 | Bleed all animals and immunize: | 4 ml EDTA + 2 ml | Freeze serum |
| Dec. 6, 2016 | Dec. 7, 2016 | 20.14 gp 160 membrane bound trimer | SST | and plasma |
| | | mRNA-LNP 50 ug | | in 250 uL |
| | | ID = 60 ul × 10 sites on the back | | aliquots |
| Wk 5 | Wk 5 | Bleed all animals + Draining lymph | 3 ml EDTA + | Freeze serum |
| Dec. 13, 2016 | Dec. 14, 2016 | node biopsies (inguinal) | Draining lymph | and plasma |
| | | | node biopsies | in 250 uL |
| | | | (inguinal) | aliquots; all |
| | | | | PBMCs |
| Wk 6 | Wk 6 | Bleed all animals | 3 ml EDTA + 2 ml | Freeze serum |
| Dec. 20, 2016 | Dec. 21, 2016 | | SST | and plasma |
| | | | | in 250 uL |
| | | | | aliquots; all |
| | | | | PBMCs |
| Wk 7 | Wk 7 | Bleed all animals | 3 ml EDTA | Freeze |
| Dec. 27, 2016 | Dec. 28, 2016 | | | plasma in |
| | | | | 250 uL |
| | | | | aliquots; all |
| | | | | PBMCs |
| Wk 8 | Wk 8 | Bleed all animals and immunize: | 4 ml EDTA + 2 ml | Freeze serum |
| Jan. 4, 2017 | Jan. 5, 2017 | 30.20 gp 160 membrane bound trimer | SST | and plasma |
| | | mRNA-LNP 50 ug | | in 250 uL |
| | | ID = 60 ul × 10 sites on the back | | aliquots |
| Wk 9 | Wk 9 | Bleed all animals | 3 ml EDTA + 2 ml | Freeze serum |
| Jan. 11, 2017 | Jan. 12, 2017 | | SST | and plasma |
| | | | | in 250 uL |
| | | | | aliquots |
| Wk 10 | Wk 10 | Bleed all animals | 3 ml EDTA + 2 ml | Freeze serum |
| Jan. 18, 2017 | Jan. 19, 2017 | | SST | and plasma |
| | | | | in 250 uL |
| | | | | aliquots; all |
| | | | | PBMCs |
| Wk 12 | Wk 12 | Bleed all animals and immunize: | 4 ml EDTA + 2 ml | Freeze serum |
| Jan. 31, 2017 | Feb. 1, 2017 | 30.12 gp 160 membrane bound trimer | SST | and plasma |
| | | mRNA-LNP 50 ug | | in 250 uL |
| | | ID = 60 ul × 10 sites on the back | | aliquots |
| Wk 13 | Wk 13 | Bleed all animals | 3 ml EDTA + 2 ml | Freeze serum |
| Feb. 8, 2017 | Feb. 9, 2017 | | SST | and plasma |
| | | | | in 250 uL |
| | | | | aliquots; all |
| | | | | PBMCs |
| Wk 14 | Wk 14 | Bleed all animals | 3 ml EDTA + 2 ml | Freeze serum |
| Feb. 14, 2017 | Feb. 15, 2017 | | SST | and plasma |
| | | | | in 250 uL |
| | | | | aliquots; all |
| | | | | PBMCs |
| Wk 16 | Wk 16 | Bleed all animals and immunize: | 4 ml EDTA + 2 ml | Freeze serum |
| Feb. 28, 2017 | Mar. 1, 2017 | 136.B18 gp 160 membrane bound | SST | and plasma |
| | | trimer mRNA-LNP 50 ug | | in 250 uL |
| | | ID = 60 ul × 10 sites on the back | | aliquots |
| Wk 17 | Wk 17 | Bleed all animals + Draining lymph | 3 ml EDTA + 1 ml | Freeze serum |
| Mar. 7, 2017 | Mar. 8, 2017 | node biopsies (inguinal) | SST + Draining | and plasma |
| | | | lymph node | in 250 uL |
| | | | biopsies (inguinal) | aliquots; all |
| | | | | PBMCs |
| Wk 18 | Wk 18 | Bleed all animals | 3 ml EDTA + 2 ml | Freeze serum |
| Mar. 14, 2017 | Mar. 15, 2017 | | SST | and plasma |
| | | | | in 250 uL |
| | | | | aliquots; all |
| | | | | PBMCs |
| Wk 20 | Wk 20 | Bleed all animals | 4 ml EDTA + 2 ml | Freeze serum |
| Mar. 28, 2017 | Mar. 29, 2017 | | SST | and plasma |
| | | | | in 250 uL |
| | | | | aliquots |
| Wk 24 | Wk 24 | Bleed all animals | 4 ml EDTA + 2 ml | Freeze serum |
| Apr. 25, 2017 | Apr. 26, 2017 | | SST | and plasma |
| | | | | in 250 uL |
| | | | | aliquots |
| Wk 28 | Wk 28 | Bleed all animals | 4 ml EDTA + 2 ml | Freeze serum |
| May 23, 2017 | May 24, 2017 | | SST | and plasma |
| | | | | in 250 uL |
| | | | | aliquots |

TABLE 18
NHP Study #142: 6-valent chimeric stabilized trimer protein (kos)

| Bleed | Receive @ | Instructions | Samples | Done at |
|---|---|---|---|---|
| Date | BIDMC | (I.D. Immunizations) | Qty/Volume Needed | BIDMC |
| Feb. 22, 2017 | Feb. 23, 2017 | Pre-LN biopsy (axillary) | 6 ml EDTA + 2 ml | Freeze |
| | | Pre-Bleed all animals and ship to Linh | SST | serum and |
| | | Mach at BIDMC via Fedex priority | +serum chemistry | plasma in |
| | | overnight | (IDEXX) + CBC | 250 uL |
| | | NHP's: | (IDEXX) | aliquots; all |
| | | 150251, 6857, T244, T245 | | PBMCs |
| Wk 0 | Wk 0 | Bleed all animals and immunize: | 6 ml EDTA + 2 ml | Freeze |
| Feb. 28, 2017 | Feb. 29, 2017 | NHP #: | SST | serum and |
| | | 150251, 6857, T244, T245 | +serum chemistry | plasma in |
| | | M5 chimeric stabilized trimer (kos) + | (IDEXX) + CBC | 250 uL |
| | | M11 chimeric stabilized trimer (kos) | (IDEXX) | aliquots; all |
| | | IM injections | | PBMCs |
| Wk 1 | Wk 1 | Bleed all animals | 6 ml EDTA + 2 ml | Freeze |
| Mar. 7, 2017 | Mar. 8, 2017 | LN biopsy (inguinal) | SST | serum and |
| | | | +serum chemistry | plasma in |
| | | | (IDEXX) + CBC | 250 uL |
| | | | (IDEXX) | aliquots; all |
| | | | | PBMCs |
| Wk 2 | Wk 2 | Bleed all animals | 6 ml EDTA + 2 ml | Freeze |
| Mar. 14, 2017 | Mar. 15, 2017 | | SST | serum and |
| | | | +serum chemistry | plasma in |
| | | | (IDEXX) + CBC | 250 uL |
| | | | (IDEXX) | aliquots; all |
| | | | | PBMCs |
| Wk 4 | Wk 4 | Bleed all animals and immunize: | 6 ml EDTA + 2 ml | Freeze |
| Mar. 29, 2017 | Mar. 30, 2017 | 20.14 chimeric stabilized trimer (kos) | SST | serum and |
| | | | +serum chemistry | plasma in |
| | | | (IDEXX) + CBC | 250 uL |
| | | | (IDEXX) | aliquots; all |
| | | | | PBMCs |
| Wk 5 | Wk 5 | Bleed all animals | 6 ml EDTA + 2 ml | Freeze |
| Apr. 5, 2017 | Apr. 6, 2017 | LN biopsy (inguinal) | SST | serum and |
| | | | +serum chemistry | plasma in |
| | | | (IDEXX) + CBC | 250 uL |
| | | | (IDEXX) | aliquots; all |
| | | | | PBMCs |
| Wk 6 | Wk 6 | Bleed all animals | 6 ml EDTA + 2 ml | Freeze |
| Apr. 12, 2017 | Apr. 13, 2017 | | SST | serum and |
| | | | +serum chemistry | plasma in |
| | | | (IDEXX) + CBC | 250 uL |
| | | | (IDEXX) | aliquots; all |
| | | | | PBMCs |
| Wk 8 | Wk 8 | Bleed all animals and immunize: | 6 ml EDTA + 2 ml | Freeze |
| Apr. 26, 2017 | Apr. 27, 2017 | 30.20 chimeric stabilized trimer (kos) | SST | serum and |
| | | | +serum chemistry | plasma in |
| | | | (IDEXX) + CBC | 250 uL |
| | | | (IDEXX) | aliquots; all |
| | | | | PBMCs |
| Wk 9 | Wk 9 | Bleed all animals | 6 ml EDTA + 2 ml | Freeze |
| May 3, 2017 | May 4, 2017 | | SST | serum and |
| | | | +serum chemistry | plasma in |
| | | | (IDEXX) + CBC | 250 uL |
| | | | (IDEXX) | aliquots; all |
| | | | | PBMCs |
| Wk 10 | Wk 10 | Bleed all animals | 6 ml EDTA + 2 ml | Freeze |
| May 10, 2017 | May 11, 2017 | | SST | serum and |
| | | | +serum chemistry | plasma in |
| | | | (IDEXX) + CBC | 250 uL |
| | | | (IDEXX)) | aliquots; all |
| | | | | PBMCs |
| Wk 12 | Wk 12 | Bleed all animals and immunize: | 6 ml EDTA + 2 ml | Freeze |
| May 24, 2017 | May 25, 2017 | 30.12 chimeric stabilized trimer (kos) | SST | serum and |
| | | | +serum chemistry | plasma in |
| | | | (IDEXX) + CBC | 250 uL |
| | | | (IDEXX) | aliquots; all |
| | | | | PBMCs |
| Wk 13 | Wk 13 | Bleed all animals | 6 ml EDTA + 2 ml | Freeze |
| May 31, 2017 | Jun. 1, 2017 | | SST | serum and |
| | | | +serum chemistry | plasma in |
| | | | (IDEXX) + CBC | 250 uL |
| | | | (IDEXX) | aliquots; all |
| | | | | PBMCs |
| Wk 14 | Wk 14 | Bleed all animals | 6 ml EDTA + 2 ml | Freeze |
| Jun. 7, 2017 | Jun. 8, 2017 | | SST | serum and |
| | | | +serum chemistry | plasma in |
| | | | (IDEXX) + CBC | 250 uL |
| | | | (IDEXX) | aliquots; all |
| | | | | PBMCs |
| Wk 16 | Wk 16 | Bleed all animals and immunize: | 6 ml EDTA + 2 ml | Freeze |
| Jun. 21, 2017 | Jun. 22, 2017 | 136.B18 chimeric stabilized trimer | SST | serum and |
| | | (kos) | +serum chemistry | plasma in |
| | | | (IDEXX) + CBC | 250 uL |
| | | | (IDEXX) | aliquots; all |
| | | | | PBMCs |
| Wk 17 | Wk 17 | Bleed all animals | 6 ml EDTA + 2 ml | Freeze |
| Jun. 28, 2017 | Jun. 29, 2017 | LN biopsy (axillary) | SST | serum and |
| | | | +serum chemistry | plasma in |
| | | | (IDEXX) + CBC | 250 uL |
| | | | (IDEXX) | aliquots; all |
| | | | | PBMCs |
| Wk 18 | Wk 18 | Bleed all animals | 6 ml EDTA + 2 ml | Freeze |
| Jul. 5, 2017 | Jul. 6, 2017 | | SST | serum and |
| | | | +serum chemistry | plasma in |
| | | | (IDEXX) + CBC | 250 uL |
| | | | (IDEXX) | aliquots; all |
| | | | | PBMCs |

[0296] This protocol describes NHP immunization study with M5, M11, 20.14, 30.20, 30.12, 136.B18 envelopes and SIVGag. In some embodiments the below vaccination regimen could be carried out with the proteins delivered as trimers, for example but not limited to SOSIP.III trimers.

TABLE 19

| | | | |
|---|---|---|---|
| | | Samples | |
| Bleed Date | Instructions | Qty/Volume Needed | Notes |

| | | |
|---|---|---|
| Pre (−12 | Collect pre samples | Plasma, PBMC, serum, |
| to −4 weeks) | (−12 to −4 weeks) | saliva, rectal swab, vaginal |
| | | swab, LN (axillary) |
| Wk 0 | Vaccination #1: M5 + M11 | Plasma, PBMC, serum, |
| (EP1) | Vaccine HIV env gp 145 DNA & SIV gag | saliva, rectal swab, vaginal |
| | DNA (Conserved element CE prime | swab, fecal sample |
| | followed by C0-delivery of CE & complete | |
| | gag boost) DNA dose = 2 mg of each | |
| | construct | |
| | Protein HIV gp 120. Env dose = 200 ug of | |
| | each protein | |
| | Adjuvant = GLA-SE 25 ug | |
| | Route: IM/EP Innovio | |
| | (n = 5) | |
| | Group 1A | |
| | Group 1B | |
| | Group 1C | |
| | Group 1D | |
| | DNA + Protein co-immunization (both | |
| | sides) = into same muscle | |
| | Group 2A | |
| | Group 2B | |
| | Group 2C | |
| | Group 2D | |
| | DNA (Left side) + Protein (Right side) = | |
| | separate sides and muscles | |
| | Group 3A | |
| | Group 3B | |
| | Sham DNA and adjuvant co-immunization | |
| | (Both Sides) = same muscle | |
| | Group 4A | |
| | Group 4B | |
| | Treatment naive | |
| Wk 1 | LN G3A, G3B, G4A, G4B @ Lt only | Plasma, PBMC, serum |
| (EP1wk 1) | | |
| Wk 2 | | Plasma, PBMC, serum, |
| (EP1 Wk 2) | | saliva, rectal swab, vaginal |
| | | swab, fecal sample |
| Wk 8 | Vaccination #2: 20.14 | Plasma, PBMC, serum |
| (EP2) | DNA dose = 2 mg of each construct | |
| | Env dose = 200 ug of each protein | |
| Wk 9 | LN ing G1A, G2A @ Rt & Lt | Plasma, PBMC, serum |
| (EP2 wk 1) | LN G3A, G3B, G4A, G4B @ Rt only | |
| Wk 10 | BM G1A, G2A | Plasma, PBMC, serum, |
| (EP2 wk 2) | | saliva, rectal swab, vaginal |
| | | swab, fecal sample, vaginal |
| | | bx, rectal bx |
| Wk 16 | | Plasma, PBMC, serum |
| Wk 24 | Vaccination #3: 30.20 | Plasma, PBMC, serum |
| (EP3) | DNA dose = 2 mg of each construct | |
| | Env dose = 200 ug of each protein | |
| Wk 25 | LN ing G1B, G2B Rt & Lt | Plasma, PBMC, serum, |
| (EP3 wk 1) | | |
| Wk 26 | BM G1B, G2B | Plasma, PBMC, serum, |
| (EP3 wk 2) | | saliva, rectal swab, vaginal |
| | | swab, fecal sample |
| Wk 32 | | Plasma, PBMC |
| Wk 40 | Vaccination #4: 30.12 | Plasma, PBMC, serum |
| (EP 4) | DNA dose = 2 mg of each construct | |
| | Env dose = 200 ug of each protein | |
| Wk 41 | LN ing G1C, G2C Rt & Lt | Plasma, PBMC, serum |
| (EP 4 wk 1) | | |
| Wk 42 | BM G1C, G2C | Plasma, PBMC, serum, |
| (EP4 wk 2) | | saliva, rectal swab, vaginal |
| | | swab, fecal sample, vaginal |
| | | bx, rectal bx |
| Wk 48 | | Plasma, PBMC |
| Wk 56 | Vaccination #5: 136.B18 | Plasma, PBMC, serum |
| (EP5) | DNA dose = 2 mg of each construct | |
| | Env dose = 200 ug of each protein | |
| Wk 57 | LN ing G1D, G2D Rt & Lt | Plasma, PBMC, serum |
| (EP5 wk 1) | | |
| Wk 58 | BM G1D, G2D | Plasma, PBMC, serum, |
| (EP5 wk 2) | *Necropsy 2 animals | saliva, rectal swab, vaginal |
| | | swab, fecal sample |
| Wk 64 | | Plasma, PBMC |
| Wk 74 | | Plasma, PBMC, serum, |
| | | saliva, rectal swab, vaginal |
| | | swab, fecal sample |

[0297] Non-limiting example of an immunization protocols with Selection F (M5, M11, 20.14, 30.20, 30.12, 136.B18). In this example the immunogens are delivered as mRNA formulated in nanoparticles. In some embodiments the stabilized trimers are of the design SOSIP.III.

[0298] Materials needed: Formulate mRNA for 6 monkeys. 6 doses×50 ug/nhp=300 ug of each mRNA construct.

[0299] Collections of Plasma, Serum, and PBMC:

[0300] Collect all plasma and serum in 250 uL aliquots and save all PBMCs. CBC collection: 850 uL from each animal

[0301] Animal studies using the above protocols could be carried out with the immunogens of Selection G (EnvSeq-2), or Selection H (EnvSeq-3).

[0302] Animal studies with envelopes CH505 T/F, as stable trimers are also contemplated. Non-limiting examples of such studies include: CH505 T/F as gp145 nucleic acid prime (once or twice), followed by sequential SOSIP 4.1 trimers of CH505 T/F, CH505 w53.16, CH505 w78.33, CH505 w100.B6. In some embodiments there is no nucleic acid prime and immunization regimen comprises sequential SOSIP 4.1 trimers of CH505 T/F, CH505 w53.16, CH505 w78.33, CH505 w100.B6. In some embodiments the nucleic acid is mRNA. In some embodiments the nucleic acid is DNA. In some embodiments the DNA is administered via electroporation. In some embodiments of these studies, animals could be boosted with CH505 w136.B8.

### Example 8: Maturation Pathway from Germline to Broad HIV-1 Neutralizer of a CD4-Mimic Antibody

[0303] Antibodies with ontogenies from V_{H}1-2 or V_{H}1-46-germline genes dominate the broadly neutralizing response against the CD4-binding site (CD4bs) on HIV-1. Here we define with longitudinal sampling from time-of-infection the development of a V_{H}1-46-derived antibody lineage that matured to neutralize 90% of HIV-1 isolates. Structures of lineage antibodies CH235 (week 41 from time-of-infection, 18% breadth), CH235.9 (week 152, 77%) and CH235.12 (week 323, 90%) demonstrated the maturing epitope to focus on the conformationally invariant portion of the CD4bs. Similarities between CH235 lineage and five unrelated CD4bs lineages in epitope focusing, length-of-time to develop breadth, and extraordinary levels of somatic hypermutation suggested commonalities in maturation among all CD4bs antibodies. Fortunately, the required CH235-lineage hypermutation appeared substantially guided by the intrinsic mutability of the V_{H}1-46 gene, which closely resembled V_{H}1-2. We integrated our CH235-lineage findings with a second broadly neutralizing lineage and HIV-1 co-evolution to suggest a vaccination strategy for inducing both lineages.

[0304] Introduction

[0305] Understanding the pathways and mechanisms of broadly neutralizing antibody (bnAb) induction is a critical goal of HIV-1 vaccine development (Bonsignori et al., 2012; Haynes, 2015; Haynes and Bradley, 2015; Haynes et al., 2012; Mascola and Haynes, 2013;). In chronic HIV-1 infections, breadth of plasma neutralization follows a uniform distribution and broad neutralization arises in ˜50% of individuals after 5 years or more of infection (Hraber et al., 2014). The delayed appearance of bnAbs suggests roadblocks to their development, and one vaccine approach is to decipher these roadblocks and devise strategies to overcome them. It is possible that—because of the high diversity of antibodies resulting from recombination and somatic hypermutation (SHM)—different bnAb lineages may have different developmental pathways and roadblocks. However, for the CD4-binding site (CD4bs), a population-level analysis on 14 donors indicated only two general types of CD4bs bnAbs: V_{H}-gene restricted and CDR H3-dominated (Zhou et al., 2015).

[0306] The V_{H}-gene restricted classes arise from two highly similar V_{H}-genes: V_{H}1-2 and V_{H}1-46 (Scheid et al., 2011; Wu et al., 2011). V_{H}1-2*02 and V_{H}1-46*01 share 93.4% (269/288) nucleotide sequence identity. Both classes give rise to antibodies that recognize the CD4bs via V_{H} structural mimicry of the immunoglobulin-like N-terminal domain of CD4 (Zhou et al., 2010; Zhou et al., 2015). For the V_{H}1-2 gene-derived antibodies, analysis of their ontogeny suggests two roadblocks based on: (i) a requirement for high levels of SHM (Klein et al., 2013; Scheid et al., 2009; Scheid et al., 2011; Wu et al., 2010), and (ii) weak binding of the inferred unmutated common ancestor (UCA) to gp120 (Jardine et al., 2013; McGuire et al., 2013; Scheid et al., 2011; Wu et al., 2011; Zhou et al., 2010; Zhou et al., 2015), although a definitive analysis from time-of-infection had not yet provided detail. In addition, several of the CD4bs bnAbs are autoreactive with ubiquitinase enzymes (Bonsignori et al., 2014; Liao et al., 2013; Liu et al., 2015).

[0307] Structure-based design of UCA-interacting immunogens has recently demonstrated a means to overcome this second roadblock, with priming of V_{H}1-2 bnAb lineages in knock-in mice (Dosenovic et al., 2015; Jardine et al., 2015). However, the maturation of primed V_{H}1-2 CD4bs B cell lineages to broad neutralization as well as the mechanism for the development of breadth remain unresolved.

[0308] For the V_{H}1-46-derived antibodies, far less is known. Two chronically HIV-infected individuals, RU1 and RU8, have developed V_{H}1-46-derived bnAbs, 1B2530 and 8ANC131 (Scheid et al., 2011). We recently described an African individual (donor CH505) who, over time, developed a CD4bs bnAb lineage (the CH103 lineage) that recognized the CD4 supersite through a CDR H3-dominated mode of interaction (Liao et al., 2013). Analysis of the co-evolution between virus and CH103 lineage demonstrated a second B cell lineage (the CH235 lineage) that cooperated by selection of escape mutants from the CH235 lineage that drove the CH103 bnAb lineage (Gao et al., 2014). Here we find that the CH235 lineage itself progressed to bnAb over 5 years of affinity maturation. We identify sequences of the CH235 lineage through longitudinal samples of 17 time points spanning weeks (wks) 6-323 post infection, assess neutralization breadth of sequential lineage members on a panel of ˜200 diverse isolates, and determine Env-complexed crystal and EM structures for lineage members. We analyze the conformity (i.e. the level of shared mutation positions and identical sequence mutations) of CH235 lineage development relative to other V_{H} gene-specific bnAb lineages in other donors, as well as the co-evolution of virus and CH235 lineage. Despite an early near-optimal binding orientation, the CH235 lineage required over 20% SHM to reach 90% neutralization breadth. Our results provide insight into the difficulties in focusing recognition to the conserved site of HIV-1 vulnerability, and suggest that CD4bs-directed antibodies, whether V_{H}-gene restricted or CDR H3-dominated, face similar obstacles in development. For V_{H}1-46- and V_{H}1-2-derived CD4-mimic antibodies, the unique genetic mutability inherent in each of these two V_{H}-germline genes helps to direct maturation, potentially providing an explanation for the prevalence of effective CD4bs antibodies derived from these two germline genes.

[0309] Results

[0310] Sequencing of B Cell Antibody Gene Rearrangements in Longitudinal Samples.

[0311] To understand the maturation of the cooperating CH235 lineage in donor CH505, we sought to identify sequences of lineage members at 17 time points, spanning wks 6 to 323 from time of infection. We first asked when we could detect members of the CH235 lineage. Next-generation sequencing (NGS) of antibody heavy chain gene rearrangements amplified from genomic DNA template of blood mononuclear cells from wk 6 to 152 (15 time points) identified a total of 479,028 unique, non-duplicated V-heavy sequences. The first V-heavy sequences belonging to the CH235 B cell lineage were found at wk 14, and additional CH235 lineage members were found at all subsequent time points. Only unique sequences in the CH235 lineage were further investigated and they were assigned to the earliest time-point (time-of-appearance) in which they were identified. Four V-heavy sequences were paired with the closest V_{L} from isolated antibodies and produced as recombinant monoclonal antibodies (mAbs) (CH235.6 through CH235.9). From cultured memory B cells collected 41 wks post-transmission we had previously isolated five members of the CH235 lineage (CH235, CH236, CH239, CH240 and CH241) (Gao et al., 2014) and we have now isolated four additional members with natural V_{H} and V_{L} pairing from cultured memory B cells collected at wks 264 and 323 post-transmission: CH235.10 through CH235.13 (FIG. 41A, FIG. 48A and FIG. 53). CH235 lineage antibodies represented 0.018% of the total memory B cell repertoire and 0.5% of the CH505 TF gp120-specific memory B cell population.

[0312] The CH235 lineage could be separated into three clades (clade I, II and III). Clade I showed a number of early lineage members, but no additional clade I sequences were observed after wk 30; clade II showed further development and included members CH241 (wk 41) and CH235.6 (wk 66), but no additional sequences were observed after wk 66; clade III developed through wk 323 and included antibodies CH235 (wk 41), CH235.9 (wk 152), and CH235.12 (wk 323) (FIG. 41A).

[0313] CH235 Lineage HIV-1 Neutralization.

[0314] To characterize the development of neutralization breadth in the CH235 lineage, we assessed antibodies in clade III for their ability to neutralize diverse HIV-1 isolates in a 199-isolate panel (FIG. 41B and FIG. 54). No isolates were neutralized by the unmutated common ancestor (UCA), whereas 18% of the viruses were neutralized by CH235 at wk 41. By wk 152, CH235.9 neutralized 77% of viruses, although with a relatively weak potency of 3 μg/ml. By wk 323, however, CH235.12 was able to neutralize 90% of viruses, and the neutralization 50% inhibitory concentration (IC₅₀) potency increased by 5-fold to 0.6 μg/ml.

[0315] We next analyzed the heterologous neutralization pattern of these antibodies to understand their development of broad neutralization (FIG. 48B) (Georgiev et al., 2013). CH235 lineage members and previously identified HIV-1 bnAbs were clustered based on heterologous neutralization activity. CH235 neutralization activity was more similar to CD4bs bnAbs than to bnAbs with other epitope specificities. While the CH235 neutralization profile was the most divergent from other CD4bs bnAbs, CH235.9 and CH235.12 were much more similar to other CD4bs bnAbs and each other. Interestingly, despite V_{H}1-46 usage, the CH235.9 and CH235.12 neutralizing profile was more similar to that of V_{H}1-2-derived antibodies, such as VRC01, than V_{H}1-46-derived antibodies, such as 8ANC131 (FIG. 48B).

[0316] Crystal Structures of CH235-Lineage Members with HIV-1 gp120.

[0317] To provide structural insight into the recognition and maturation of the CH235 lineage, we prepared the antigen-binding fragments (Fabs) of antibodies CH235 (wk 41 from time of infection, 18% breadth), CH235.9 (wk 152, 77%) and CH235.12 (wk 323, 90%), and co-crystallized, solved and refined these in complex with the gp120 core of HIV-1 isolate strain (93TH057) (FIGS. 42A-E, FIG. 55). We mapped the location of residues altered during SHM and observed changes throughout the variable domain (FIG. 42A).

[0318] Comparison of the orientation of the V_{H} of CH235 in Env binding with that of CD4, VRC01 and 8ANC131 (Scheid et al., 2011) showed that the CH235 V_{H} domain mimicked CD4 in Env binding and was highly similar to the V_{H} orientation and structure of the VRC01 and 8ANC131 V_{H} chains: in particular, the V_{H}1-46 of CH235 preserved key contacts mediated by the CDR H2 loop for the CD4 binding loop and for the gp120 D368 (FIG. 49A,B).

[0319] Analysis of the angle of recognition for the CH235 lineage indicated little change during maturation, with CH235, CH235.9 and CH235.12 all clustering within the larger VRC01-class of antibodies. Interestingly, other V_{H}1-46 antibodies clustered differently, with antibody 1B2530 from HIV-1-positive donor RU1 at a highly similar angle and 1.5 Å translated, and antibodies 8ANC131 and 8ANC134 from HIV-1-positive donor RU8 occupying a cluster about 55 degrees and 3.5 Å translated related to the CD4 (FIG. 49C).

[0320] These results suggest that the gp120-antibody orientation was determined early in bnAb lineage ontogeny, with further maturation maintaining the same general orientation. Overall, the structures of CH235 lineage members with HIV-1 gp120 Env revealed CD4 mimicry. While the V_{H} gene usage classifies the CH235 lineage within the V_{H}1-46-derived 8ANC131 bnAb class, it is both functionally and structurally closer to the VRC01 class (Zhou et al., 2015).

[0321] Negative Stain EM of CH235-Lineage Members with Trimeric HIV-1 Env.

[0322] To visualize the recognition of the CH235 lineage in the context of the HIV-1 Env trimer, we used negative stain EM to determine 3D-reconstructions of Fabs CH235, CH235.9 and CH235.12 bound to trimeric BG505 and B41 HIV-1 Env glycoproteins (FIG. 42B) (Pugach et al., 2015; Sanders et al., 2013). Notably, the stoichiometry increased with antibody maturation, with CH235 (8% V_{H} mutation) binding with a stoichiometry of 1:1 (BG505; FIG. 42B, top, FIG. 49D-F) or 2:1 (B41; FIG. 42B, bottom, FIG. 49D-F) Fabs per trimer and CH235.9 and CH235.12 (19% and 25% V_{H} mutation, respectively) binding with a 3:1 Fab to trimer ratio (FIG. 42B). We next compared the orientation and stoichiometry of CH235.12 Fab with that of CH103, a CDR H3-dependent CD4bs bnAb isolated from the same subject (Liao et al., 2013). EM analysis of either CH235.12 or CH103 Fab in complex with BG505 SOSIP.664 revealed structural differences between the CDR H3-dominated CH103 class bnAb and the 8ANC131-class CH235.12 bnAb and, in accordance with crystallographic results, the angle of approach of CH235 was similar to that of VRC01 and other CD4 mimicking bnAbs (FIG. 49G).

[0323] Despite the CD4 mimicry by CH235, the trimer remained in a closed conformation when the CH235 lineage members were bound. However, the EM-derived model of CH103 in complex with BG505 revealed that CH103 either bound to or induced a more open version of the trimer. This conformation represents an intermediate state between the closed, compact trimer in complex with CH235 or VRC01, and the CD4-induced open model in complex with soluble CD4 or 17b Fab (FIG. 49G). Similar to more mature CH235 lineage bnAb Fabs, bnAb CH103 bound to BG505 with a stoichiometry of 3 Fabs per trimer. (FIG. 49G).

[0324] Maturation Focuses CH235 Lineage Recognition to a Conserved Site of CD4 Vulnerability.

[0325] To gain insight into the structural consequences of maturation, we mapped the epitope of CH235 lineage members relative to the conformationally invariant CD4 supersite of vulnerability (Zhou et al., 2015). When we mapped the CH235 footprint on gp120, we observed portions of the CH235-binding surface on gp120 to be outside of the CD4 supersite of vulnerability (FIG. 42C, left). This surface was reduced in CH235.9 and CH235.12 structures, especially on variable loop V5. Recognition by the CH235.12 antibody concentrated almost entirely on the CD4 supersite of vulnerability, with little interactions with the inner domain or variable loop V5; there was, however, a large remaining interaction with the conserved loop D region (FIG. 42C, middle and right).

[0326] To quantify targeting precision, we computed the buried surface between antibodies and gp120 co-crystal complexes, for the region overlapping the CD4 supersite of vulnerability minus the region outside the vulnerable site. Overall targeting precision correlated with neutralization breadth (P=0.0007) (FIG. 42D). The CH235-lineage antibodies all showed good targeting precision. We also analyzed the correlation of SHM versus neutralization breadth (P=0.0097) (FIG. 42E): While the CH235 lineage generally trended towards lower SHM relative to neutralization breadth, all CD4bs bnAbs appeared to require a high degree of SHM, independent of whether the antibody derived from a specific V_{H}-gene or used a CDR H3-dominated mode of recognition.

[0327] Overall, the results suggest that maturation requires a high degree of SHM to focus recognition onto the CD4 supersite of vulnerability and that this high degree of SHM is a general requirement of all CD4bs bnAb lineages, even those that begin with highly favorable orientations such as CH235.

[0328] Conformity of Sequence Evolution of CH235 Lineage.

[0329] The mutation levels of CH235-lineage antibodies isolated 41 wks post infection from memory B cell cultures was markedly lower (range 7-11%;) than that of all previously reported V_{H}1-46 and V_{H}1-2 CD4bs bnAbs (>25%) (Scheid et al., 2011; Sui et al., 2010; Wu et al., 2010; Zhou et al., 2015) (FIG. 53). The mutation levels of CH235-lineage antibodies isolated up to 264 wks post infection increased to ˜20%, but were still lower than those of most other bnAbs until 323 wks post infection (CH235.12:26% mutations) (FIG. 43A).

[0330] To quantify the conformity of CH235-lineage antibodies to the two V_{H}1-46-derived bnAbs (1B2530 from donor RU1 and 8ANC131 from donor RU8) (Scheid et al., 2011; Zhou et al., 2015), we analyzed the similarity of shared mutation positions (positional conformity) and shared identical mutations (identity conformity) of the V_{H} genes (FIG. 43B, FIG. 50A). As a comparison, we also calculated the positional conformity and identity conformity of non-HIV-1 targeting antibodies isolated from 3 HIV-1 negative donors relative to template antibodies 1B2530 and 8ANC131. Positional conformity in SHM was spread over a large range (50-90%), and there did not seem to be much discrimination between V_{H}1-46 in antibodies that effectively neutralized HIV-1 and those that did not (FIG. 43B, top panels). Identity conformity in SHM was also spread over a large range (0-75%) (FIG. 43B, bottom panels), and while little discrimination was observed between V_{H}1-46 in antibodies that effectively neutralized HIV-1 and those that did not for antibody 8ANC131, there was discrimination among CD4bs antibodies when 1B2530 was used as a reference (FIG. 43B, bottom left panel). The differences in CH235-lineage identify conformity to 1B2530 or to 8ANC131 may reflect the greater similarity of the recognition orientation of CH235-lineage members with 1B2530 (FIG. 49C) and suggested that slight differences in recognition orientation can substantially alter factors associated with identity conformity.

[0331] Overall, these results indicated SHM in response to HIV-1 infection to proceed in a manner that depended less on functional selection and more on intrinsic properties of the V_{H}1-46-gene, especially related to the position of residues that undergo SHM. To investigate further the contribution of the V_{H}1-46 gene, we analyzed SHM observed in V_{H}1-46 gene transcripts from three uninfected individuals (FIG. 43C, top); notably, all 11 positions mutated in CH235, 1B2530 and 8ANC131 were also mutated among non-HIV-1 neutralizing antibodies with high frequency (≥20%). Moreover, the residue substitutions in CH235 were frequently found in the top three most commonly observed substitutions for that position in the V_{H}1-46 gene. To quantify the impact of gene mutability, we compared the difference in probability distributions of positional and identity conformity for sequences simulated with and without taking into account the intrinsic V_{H}1-46 gene mutability. The simulations showed that both positional and identity conformity shifted to a higher level of similarity when considering gene mutability (FIGS. 50B and 50C). Notably, a substantial shift in probability was observed for the positional conformity of CH235 (FIG. 50B, FIG. 56A). Similar shifts in identity conformity were also observed for CH235 (FIG. 50C, FIG. 56B). Thus, the intrinsic susceptibility at specific sites of the V_{H}1-46 germline gene to mutation as well as to the frequency of specific mutations that existed at each of these sites appeared to be a dominant factor in the SHM alteration of the CH235 lineage. These results are in line with our previous finding that selection and mutability synergized during affinity maturation of an influenza HA-reactive clone from a non-HIV-1 infected person to hemagglutinin (HA) (Kepler et al., 2014): hence, the dominant role of intrinsic susceptibility at specific sites may be a more general biological phenomenon in dictating the course of SHM.

[0332] Because V_{H}1-2 is genetically the most closely related germline gene to V_{H}1-46, we also examined the mutability of the V_{H}1-2 gene (FIG. 43C, bottom). Consistent with V_{H}1-46 antibodies, the mutated positions among V_{H}1-2 derived bnAbs also showed high frequency of mutation among non-HIV-1 targeting V_{H}1-2 antibodies, suggesting that gene mutability contributes to V_{H}1-2 derived HIV-1 antibody evolution. Notably, the average mutability of the V_{H}1-2 gene at positions where the CH235 antibody showed SHM was generally high: 9 of 15 positions mutated in CH235 antibody were also mutated in more than 15% of V_{H}1-2-derived NGS reads. In 10 of these 15 positions, the mature V_{H}1-2-derived bnAbs (VRC01, VRC-CH31 and VRC-PG04) also showed changes. When we analyzed mutability of other V_{H} genes used by CD4bs bnAbs (V_{H}1-69, V_{H}3-23, V_{H}3-30, and V_{H}4-59) (Zhou et al., 2015) (FIG. 50D), we observed gene mutability patterns different from that of V_{H}1-46 while, in contrast, the mutability patterns of V_{H}1-2 and V_{H}1-46 were more similar (FIG. 56C). Despite the similarity between V_{H}1-2 and V_{H}1-46, we did observe that antibody sequences from CD4bs bnAbs of each gene segregated phylogenetically (FIG. 50E), indicating differences in maturation pathway between bnAbs evolving from these two germline genes.

[0333] These data suggested that for both V_{H}1-2 and V_{H}1-46 germline genes-derived bnAbs, somatic mutations that lead to neutralization breadth appeared to be primarily determined by the intrinsic mutability of V_{H}1-46 and V_{H}1-2 germline genes. The differences in the intrinsic mutabilities of these V_{H} genes may contribute to the high occurrence of CD4bs bnAbs that originate from either V_{H}1-2 or V_{H}1-46 (Zhou et al., 2015).

[0334] Interaction Between CH235 and CH103 bnAb Lineages.

[0335] While gene mutability plays a role in determining the position where SHM occurs, binding between antibody and HIV-1 Env likely also plays a role in selecting or fixing a mutation. A hallmark of cooperating B cell lineages is that they interact at the same site as the bnAb lineage that is being driven (Gao et al., 2014).

[0336] To determine a mechanism whereby the initial interaction of the early CH235 and CH103 lineage members bind to the same or similar epitope and result in CH235 selection of escape mutants that stimulated the CH103 bnAb lineage (Gao et al., 2014), we evaluated cross-competition between early CH235 lineage antibodies and the CH103 lineage antibody CH106 in ELISA, as an example of early CH103 lineage development, and measured their association rate constant with surface plasmon resonance (SPR). Since both the CH235 and CH103 lineages bound to the loop D gp120 region, we asked if the early CH235 lineage antibodies could block the binding of the CH103 lineage mature antibody CH106, or block the binding of soluble (s)CD4 to CH505 TF gp120 Env. CH241 was the only antibody in the CH235 lineage that strongly blocked CH106 bnAb and sCD4 binding to CH505 gp120 (IC₅₀=2.6 and 1.5 μg/ml, respectively) (FIG. 57A).

[0337] To confirm early dominance of the binding of CH103 lineage compared to the CH235 lineage to CH505 TF Env, we reversed the blocking assay and asked if bnAb CH106 could block the binding of biotinylated CH235, CH236, CH239, CH240 or CH241. CH106 strongly blocked the binding of all the CH235 mature antibodies with IC50s ranging from 2.3 μg/ml (for CH240) to 14.3 μg/ml (for CH241) (FIG. 57B). These data suggested that the earliest maturation intermediates of the CH235 lineage antibodies could not outcompete CH106 bnAb for binding to CH505 TF gp120 Env.

[0338] Affinity maturation in germinal centers is subjected to kinetic selection and involves improvement in dissociation rate constant (K_{d}) that is often driven by an improvement in the kinetic association rate (kₐ), which is a key variable in conferring a binding advantage for the cognate epitope to an antibody over other competing antibodies (Foote and Milstein, 1991; Kepler et al., 2014). We measured the kₐ and dissociation kinetic rate (k_{d}) of the CH505 TF gp120 Env binding by CH235 and CH103 with SPR to identify differences that might explain the relative inability of the CH235 lineage to block the binding of the CH103 lineage bnAbs to autologous CH505 TF Env and found that the two lineages followed two distinct trajectories and modalities to increase their overall affinity.

[0339] The UCA of the CH103 lineage bound to CH505 TF Env with a K_{d} of 227 nM which increased one order of magnitude throughout affinity maturation (FIG. 44A). The CH103 UCA displayed a fast association rate (kₐ=37×10³ M⁻¹ s⁻¹) which was maintained across the intermediate and mature mAbs (kₐ=11.9−37.3×10³ M⁻¹ s⁻¹), suggesting that maintaining the fast association rate was important for survival and maturation of the CH103 lineage (FIG. 44B). In contrast, the CH235 lineage mAb Ka increased four orders of magnitude during affinity maturation (from 30.6 mM of IA4—the earliest intermediate mAb in the CH235 lineage for which kinetic rates could be measured—to 0.7 nM of CH241) (FIG. 44C). Such increase was predominantly facilitated by slower dissociation rates (k_{d}) observed in later intermediates and mature mAbs, which decreased from 88.1×10⁻³ s⁻¹ of IA4 to 0.33×10⁻³ s⁻¹ of CH241 (FIG. 44D). Conversely, CH235 lineage mAbs bound to CH505 TF gp120 Env with kₐ that started off an order of magnitude slower than CH103 UCA and its earlier intermediates (IA4 kₐ=2.9×10³ M⁻¹ s⁻¹) and only modestly improved—primarily between IA1 and CH235 mAbs—with the majority of the early CH235 mAbs having slower kₐ than CH103 mAbs (FIG. 44D).

[0340] Thus, the relative inability of wk 41 CH235 lineage antibodies to block early mature CH103 lineage mAbs could be explained by the observed differences in their association rates, and these data provide an explanation of how the CH235 antibody lineage exerted its cooperating function in driving autologous virus toward better neutralization by the CH103 antibody lineage without impeding concurrent development of the CH103 antibody lineage itself

[0341] Late CH235 Lineage Broadly Neutralizing Antibodies Neutralize Autologous Loop D Escape Viruses Selected by Early CH235 Lineage Members.

[0342] We have previously demonstrated that the CH235 lineage selected escape viruses with mutations in the loop D region of gp120 Env that rendered loop D mutant viruses more sensitive to the CH103 bnAb lineage and that autologous virus escaped from early CH235 lineage antibodies by wk 30 after infection (Gao et al., 2014). We have now isolated autologous viruses through wk 323 and determined the neutralization capacity of the late CH235 lineage bnAbs. Viruses partially sensitive to the later members of the CH235 lineage (particularly bnAbs CH235.9 and CH235.12) were found as late as wk 176 (FIG. 45A, FIG. 58). These viruses still contained the loop D mutations that were selected by virus escape from early antibody members of the CH235 lineage (Gao et al., 2014). Hence, we tested the ability of the late CH235 lineage bnAbs to neutralize the panel of CH505 TF loop D mutants (Gao et al., 2014). Remarkably, CH235.9, CH235.12 and CH235.13 bnAbs acquired the ability to neutralize all loop D mutants that were resistant to the early members of the CH235 lineage (FIG. 45B and FIG. 59). In particular, CH235.9, CH235.12 and CH235.13 neutralized CH505 TF gp120 M8, M20 and M21 (not neutralized by early lineage member CH236), which differed from CH505 TF gp120 M6 and M10 (neutralized by CH236) by a single mutation at position 280 (N280S for M8 and M20, and N280T for M21) (FIG. 45B).

[0343] In the gp120-complexed structure, the side chains of N280 forms three hydrogen bonds with two residues in the CDR L3 and these hydrogen bonds are predicted to be disrupted by the N280S and N280T mutations (FIG. 51A). Since the CH235.9 antibody had the VL of CH236, the direct implication was that mutations in the heavy chain were responsible for the ability of CH235.9 to neutralize loop D mutant viruses. Interestingly, CH235.7, which did not neutralize autologous viruses beyond wk 53, also had the VL of CH236 but, in contrast to CH235.9, failed to neutralize CH236-resistant loop D mutants M7, M8, M9, M20 and M21.

[0344] Therefore, we reverted the 5 amino acids (aa) in CH235.9 V_{H} at gp120 contact positions that were different from those present in CH236 V_{H} but not shared with CH235.7 V_{H}: N30T and D31T in CDR H1, G62Q and G65Q in FR H3 and A103E in CDR H3 (FIG. 51B). Five of the six CH235.9 mutants retained the ability to potently neutralize all the CH505 TF loop D mutant viruses. In contrast, the N30T mutation in CDR H1 reverted CH235.9 to the CH236 phenotype (CH236 has a threonine in position 30): M21 neutralization was abrogated, M20, M7 and M9 were near completely abrogated (CH235.9 N30T IC50 >44 μg/ml) and M8 IC₅₀ increased 37-fold (CH235.9 IC₅₀=0.66 μg/ml vs CH235.9 N30T IC₅₀=24.31 μg/ml) (FIG. 59).

[0345] Thus, acquisition of extraordinary breadth in the CH235 bnAb lineage was associated with accumulation of somatic mutations in CDR H1 that enabled late CH235 lineage antibodies to neutralize autologous loop D mutant viruses that were escape mutants from early CH235 antibodies. CH235.9 bnAb residue N30 contacts R429 in the 1320-1321 loop of the C4 region of gp120 Env, which is on the opposite face of the CD4bs from loop D (FIG. 45C). In addition, CH505 TF has a glutamic acid in position 429 that is in close enough proximity to N30 to form a hydrogen bond.

[0346] These findings indicate a mechanism for acquiring the ability to neutralize loop D mutants via a compensatory mutation in the CH235 V_{H}DJ_{H} which strengthens the binding to the gp120 C4 region by introducing hydrogen bonds that correct the loss of neutralization due to disruption of the hydrogen bonds between loop D and the CH235 mAb light chain.

[0347] CH235 and CH103 Lineage Antibody Binding to CH505 gp120 Env.

[0348] We tested the CH235 lineage antibodies for binding to 113 recombinant CH505 gp120 Env isolated from time of transmission to wk 160 post-transmission, including CH505 TF loop D mutant Envs (FIG. 46A and FIG. 60). Of note, CH235.9 and CH235.12 bound to 4/22 and 8/22 Envs isolated from wk 136 and 160 post-transmission, respectively, including Envs from viruses that were also neutralized. We have previously reported Env binding to the initial members of the CH103 lineage (Hraber et al., 2015), and have now performed the same Env binding analysis of the CH103 lineage with 10 additional matured bnAb members of the CH103 lineage (FIG. 46A and FIG. 60). We have used these data to select CH505 gp120 Env quasi-species that bound to mature and precursor bnAbs of both lineages, defining a series of CH505 Env immunogens now optimized and predicted to induce both bnAb lineages (FIG. 52A).

[0349] We had previously reported that CH235 UCA weakly reacted with CH505 TF gp120 at −10 μM as determined by SPR (Gao et al., 2014). Here we show stronger binding of the CH235 UCA to 8/113 autologous CH505 gp120 Envs measured in ELISA (FIG. 46A and FIG. 60). Moreover, in a panel of 15 heterologous Envs from multiple clades, CH235 UCA bound to 3/15 Envs and the introduction of only 3 mutations (W47L, G54W and S56R), which were selected based on the increase in surface area of interaction (G54W and S56R) or the reduction in clash score (W47L), increased this recognition (to 5/15 Envs), of which the dominant effect appeared to be reduction in clash (FIG. 46B and FIG. 52B).

[0350] Autoreactivity in the CH235 B Cell Lineage.

[0351] Development of auto- and polyreactivity during antibody maturation toward neutralization breadth is a critical aspect that may limit the ability of generating bnAbs during natural infection and upon vaccination (Bonsignori et al., 2014; Haynes et al., 2005; Haynes et al., 2012; Haynes and Verkoczy, 2014; Liu et al., 2015; Verkoczy et al., 2013; Verkoczy et al., 2010; Verkoczy et al., 2011). We had previously reported that in HIV-1-infected individual CH505, the CD4bs CH103 bnAb lineage was polyreactive and, similar to VRC01-class bnAbs, bound to human ubiquitin ligase E3A (UBE3A) with avidity correlated with neutralization (Liao et al., 2013; Liu et al., 2015). In addition, most of the mutations introduced in VRC07—a somatic variant of VRC01—that enhanced neutralizing activity also resulted in increased autoreactivity (Rudicell et al., 2014). Since CH235.12 is a potent and extremely broad CD4-mimic CD4bs bnAb, we compared the auto- and polyreactivity profile of CH235.12 with other members of the CH235 lineage. Most CH235 lineage antibodies displayed reactivity against DNA and sporadic reactivity with Sc170 (CH235.7) (FIG. 47A). CH241 bound to cardiolipin (FIG. 47B). In Hep-2 IF staining CH236, CH235.7 and CH235.9 were all cytoplasmic positive (FIG. 47C). Conversely, CH235.12, despite being highly mutated and broadly neutralizing, did not display autoreactivity in any of these assays (FIG. 47A-C) Of particular note, CH235 lineage antibodies, including CH235.12, did not react with UBE3A (FIG. 47D).

[0352] These data identify CH235.12 as an antibody that has developed neutralization breadth without being itself auto- and polyreactive, while less mutated precursor antibodies (CH235 is in the same clade of CH235.12) did develop autoreactivity. We conclude that in vivo decoupling of neutralization breadth of CD4 mimic CD4bs bnAbs from auto- and polyreactivity can occur, even for bnAb lineages that have developed autoreactivity during the course of their maturation and, therefore, inducing such bnAbs from such lineages through vaccination, though difficult, is an achievable goal.

[0353] Discussion

[0354] Here we have traced the ontogeny of the CH235 V_{H}1-46 8ANC131 class of CD4bs bnAbs from acute infection to chronic infection and defined both the structural and functional pathways of bnAb lineage induction. That the CH235 bnAb lineage that selected virus escape mutants that drove the CH103 CD4bs CDR H3-dependent bnAb lineage is itself an 8ANC131-class bnAb lineage and co-evolved with the CH103 bnAb is a remarkable demonstration of a bnAb-to virus-to bnAb interaction in the same HIV-1 infected individual. In addition, the similarity of V_{H}1-46 8ANC131-like and V_{H}1-2 VRC01 family CD4 supersite bnAbs demonstrates dramatic convergence of antibody structures to recognize the CD4 supersite. The CH235 lineage required over 20% SHM in heavy chain variable domain to achieve 90% breadth. Fortunately, a substantial portion of the V_{H}-gene SHM was guided by the intrinsic mutability of the V_{H}1-46 germline gene. Moreover, the CH235 lineage Ab that became broadly neutralizing acquired the ability to neutralize loop D mutants selected by early Ab lineage members (Gao et al., 2014) with a mechanism involving a compensatory mutation (T30N) in CDR H1, which allowed the formation of H-bonds with the HIV-1 gp120 C4 region, thus correcting the original loss of binding

[0355] The driving forces of the CH235 lineage were the natural transmitted/founder and M5 Envs. In addition, despite near-complete autologous virus escape from CH235 lineage antibodies by wk 100, viruses arose later during the course of infection, which were sensitive to the more mature CH235 bnAb members and likely contributed to antigen drive. It is interesting to note that many of these late viruses were less sensitive to CH103 CDR H3 binder bnAbs prompting the hypothesis that the CH103 lineage may have the capacity for cooperation with the CH235 lineage after 5-6 years of co-development. Finally, the CH235.12 antibody that evolved late in CH235 development is an extraordinary broad and potent non-autoreactive antibody and is a candidate for preventive and therapeutic uses.

[0356] In summary, the acquisition of neutralization breadth in the CH235 VRC01-like V_{H}1-46 CD4 mimic bnAb occurred with the sequence of transmitted/founder and early mutant-initiated antigen drive, selection of Env loop D mutants that cooperated with the CH103 bnAb lineage to drive it to bnAb breadth, followed by acquisition of the ability of the CH235 lineage itself to neutralize autologous loop D mutants coincident with potent neutralization of a broad array of heterologous HIV-1 isolates. Mapping these events points to a strategy for the simultaneous induction of both CDR H3 and VRC01-class CD4bs bnAbs, whereby sequential immunizations with transmitted founder Env followed by loop D mutant Envs comprise a rational immunization strategy.

[0357] Experimental Procedures

[0358] Donor and Sample Information.

[0359] Donor and sample information was previously reported (Liao et al., 2013) and is summarized in Supplemental Experimental Procedures.

[0360] Memory B cell cultures were performed on PBMCs collected at 264 and 323 wks post-transmission. All work related to human subjects was in compliance with Institutional Review Board protocols approved by the Duke University Health System Institutional Review Board.

[0361] Preparation of Libraries for 454 DNA Pyrosequencing.

[0362] 454 DNA pyrosequencing was performed on genomic DNA template isolated with Qiagen kits from PBMCs collected at 6, 7, 8, 9, 14, 20, 22, 30, 41, 53, 66, 92, 100, 144 and 152 wks post-transmission as described in (Boyd et al., 2009) and in Supplemental Experimental Procedures. Only unique V-heavy rearrangements were included in the analysis to generate the phylogeny; in the case of duplicated sequences, the earliest occurrence was included in the analysis.

[0363] Phylogenetic Analysis.

[0364] For clonal phylogenetics, the UCA was inferred using Cloanalyst (Kepler, 2013), which simultaneously estimates the UCA and the phylogenetic tree relating the observed sequences to each other and to the UCA. Internally, Cloanalyst uses dnaml from the PHYLIP suite of phylogenetic software (Felsenstein, 2005). The CH235 antibody lineage clonogram was displayed using the ete2 Python package.

[0365] Isolation of CH235 Lineage Antibodies from Donor CH505.

[0366] Fluorescence-activated cell sorting of antigen-specific IgG B cells from PBMC and the amplification and cloning of immunoglobulin genes were performed as described in (Bonsignori et al., 2011). CH505.TF gp120 Env-positive memory B cells were cultured as described in Supplemental Experimental Procedures.

[0367] Neutralization Assays.

[0368] Neutralization of donor CH235 mAbs were measured using single-round-of-infection HIV-1 Env pseudoviruses and TZM-bl target cells as described in Supplemental Experimental Procedures.

[0369] Neutralization Signature.

[0370] Antibody neutralization signatures were computed and compared as described in Supplemental Experimental Procedures.

[0371] Monoclonal Antibody and Antigen-Binding Fragment (Fab) Production.

[0372] Ig genes of mAbs were amplified from RNA and expression plasmids for heavy and kappa chains were constructed. Expression and purification of recombinant IgG mAbs and preparation of Fab fragments are described in Supplemental Experimental Procedures.

[0373] Crystallization, X-Ray Data Collection, Structure Determination, and Refinement of Donor CH235 Antibodies in Complex with HIV-1 gp120.

[0374] Purification, crystallization of antibody-gp120 complexes, data collection, structure solution, refinement and analysis are described in Supplemental Experimental Procedures. Diffraction data were integrated and scaled with the HKL2000 suite (Otwinowski and Minor, 1997).

[0375] Electron Microscopy Data Collection and Processing.

[0376] BG505 SOSIP.664 and B41 SOSIP.664 gp140 trimers and donor CH235-derived Fab complex negative-stain electron microscopy images, analysis and visualization are described in the Supplemental Experimental Procedures.

[0377] Focused Maturation and Conformity Analysis.

[0378] Focused maturation and mAb conformity analysis are described in the Supplemental Experimental Procedures.

[0379] Surface Plasmon Resonance Affinity and Kinetics Measurements.

[0380] MAb binding to autologous CH505 gp140 was measured using a BIAcore 3000 or BIAcore T200 instrument (GE Healthcare) as described in (Alam et al., 2007; Alam et al., 2009; Liao et al., 2013) and in Supplemental Experimental Procedures.

[0381] Direct-Binding ELISA.

[0382] Direct-binding ELISAs were performed as described in Supplemental Experimental Procedures.

[0383] MAb CH235.9 Amino Acid Reversion.

[0384] Site-directed mutagenesis of the CH235.9 mAb genes was performed using the Quikchange lightning multi-site-directed mutagenesis kit (Agilent) following manufacturer's protocol. Primers are listed in Supplemental Experimental Procedures.

[0385] Structural Modeling.

[0386] Loop D mutations were structurally modeled using PyMOL with sidechains placed in the most frequently observed rotamer that did not result in steric clashing with neighboring residues. Hydrogen bonds were calculated using HBPLUS software (McDonald and Thornton, 1994).

[0387] Recombinant HIV-1 Proteins.

[0388] HIV-1 genes of autologous CH505 Env were determined from samples collected from 4 to 323 wks post-infection by single genome amplification (Keele et al., 2008) and produced as described in (Liao et al., 2013).

[0389] Protein Array.

[0390] MAbs were screened for binding on protein microarrays (ProtoArray) (PAH0525101; Invitrogen) pre-coated with 9,400 human proteins in duplicate and screened following manufacturer's instructions and as described in (Liu et al., 2015; Yang et al., 2013).

[0391] HEp-2 Cell Staining.

[0392] Indirect immunofluorescence binding of mAbs or plasma to HEp-2 cells (Zeuss Scientific) was performed as previously described (Bonsignori et al., 2014; Haynes et al., 2005).

[0393] Supplemental Experimental Procedures

[0394] Donor and Sample Information.

[0395] The CH505 donor, from which the CH103 and the CH235 antibody lineages were isolated, is an African male enrolled in the CHAVI001 acute HIV-1 infection cohort (Tomaras et al., 2008) and followed for over 6 years. During this time viral load ranged from 14,460 to 847,279 copies/ml (median=173,667 copies/ml), and CD4 counts ranged from 69 to 431 cells/mm³ (median=294 cells/mm³).

[0396] The time of infection was estimated by analyzing the sequence diversity in the first available sample using the Poisson Fitter tool (Giorgi et al., 2010) as described in (Liao et al., Nature 2013). Results were consistent with a single founder virus establishing the infection and with the earliest isolated virus sequences being taken 4 weeks post-transmission.

[0397] Flow Cytometry, Memory B Cell Cultures and mAb Isolation.

[0398] The HIV-1 CH505.TF gp120 envelope glycoprotein was produced and used in flow cytometry on PBMC collected from donor CH505 at week 264 and 323 post-transmission using a two-color technique as described (Gray et al., 2011).

[0399] CH505.TF gp120 Env-positive memory B cells were cultured as described (Bonsignori et al., 2011) with the following modifications: non-irradiated MS40L cells were used as feeder cells at a concentration of 3,000 cells/well and were added to wells in which memory B cells were sorted in bulk; 50 ng/ml of recombinant human (rHu) IL-21 (200-21; Peprotech, Rocky Hill, N.J.) were added to the complete medium; memory B cells were distributed by limiting dilution at a calculated concentration of 2 cells/well; culture medium was refreshed every 5 days.

[0400] Cell culture supernatants were screened for neutralization of autologous CH505.TF virus using the tzm-bl neutralization assay (Bonsignori et al., 2011; Montefiori, 2005) and for binding to CH505.TF gp120 Env, CH505.TF Δ371I gp120 Env mutant, HIV-1 Env resurface core protein 3 (RSC3) and RSC3 Δ371I (Wu et al., 2010).

[0401] MAbs CH235.10 through CH235.13 were isolated from cultures that displayed differential binding of CH505.TF and CH505 TF 43711 gp120 Env, did not bind to RSC3 (Gao et al., 2014) and neutralized 13 to 99% CH505.TF infectivity.

[0402] CH235 lineage antibody frequency over total memory B cells was calculated by dividing the number of CH235 lineage antibodies isolated at week 41 (n=5; Gao et al., 2014) for the number of memory B cells analyzed (n=27,950). CH235 lineage antibody frequency over CH505.TF gp120 Env-specific memory B cells was calculated by dividing the number of CH235 lineage antibodies isolated at weeks 264 and 323 (n=4) for the number of CH505.Env gp120-specific memory B cells analyzed (n=794).

[0403] 454 Pyrosequencing of CH235 Lineage Heavy Chains.

[0404] Antibody heavy chain gene rearrangements were PCR amplified from 6 independent 100 ng genomic DNA aliquots to generate 6 barcoded libraries per sample. Multiplexed primers complementary to the IGHV FR1 or FR2 framework regions, and an IGHJ-primer were modified from the BIOMED-2 consortium primers (Boyd et al., 2009; van Dongen et al., 2003). 10-nucleotide ‘barcode’ sequences in the primer sets encoded sample identity and replicate library identity. AmpliTaq Gold (Roche) enzyme was used for PCR following the manufacturer's instructions, with a thermocycler program: 94° C. 5 min; 35 cycles of (94° C. 30 sec, 60° C. 45 sec, 72° C. 90 sec); and final extension at 72° C. for 10 min. Following quantitation, PCR products from each replicate library were pooled in equimolar amounts, then the pooled library was run on a 1.5% agarose gel and gel extracted (Qiagen). High-throughput sequencing was performed on the 454 (Roche) platform using Titanium chemistry.

[0405] Antibody Production.

[0406] Immunoglobulin genes of mAbs CH235.10 through CH235.13 were amplified from RNA from isolated cells, expression cassettes made, and mAbs expressed as described (Gao et al. 2014). The V_{H} genes of mAbs CH235.6 through CH235.9 were retrieved from sequences obtained through genomic DNA 454 sequencing, which were restored to full length and complemented with the VL of the phylogenetically closest isolated antibody in the CH235 lineage (i.e. CH241 for CH235.6 and CH235.8, and CH236 for CH235.7 and CH235.9). We have previously described the isolation of mAbs CH235, CH236, CH239, CH240 and CH24 land the inference of unmutated common ancestor (UCA) and intermediate antibodies IA1 through IA4 (Gao et al., 2014; Kepler, 2013).

[0407] Heavy chain plasmids were co-transfected with appropriate light chain plasmids at an equal ratio in Expi 293 cells using either 293Fectin or ExpiFectamine 293 transfection reagents (Thermo Fisher Scientific) according to the manufacturer's protocols. Cultures were supplemented with AbBooster antibody expression enhancer media (ABI Scientific) at 10% of the final culture volume 24 h after transfection. Cultures were then incubated at 33° C. for 5 more days, and supernatants were harvested and passed over a protein A affinity column. Following PBS wash and low pH elution, the pH of eluate was neutralized with 1 MTris pH 8.5 and samples were dialyzed against PBS. Antibodies were then aliquoted and stored at −80° C. prior to use. Alternatively, for ExpiFectamine transfections we used the enhancer provided with the kit, transfected cultures were incubated at 37° C. 8% CO₂ for 2-6 days, harvested, concentrated and incubated overnight with Protein A beads at 4° C. on a rotating shaker before loading the bead mixture in columns for purification; following PBS/NaCl wash, eluate was neutralized with trizma hydrochloride and antibody concentration was determined by Nanodrop. Purified antibodies were tested in SDS-Page Coomassie and western blots, and stored at 4° C.

[0408] Direct-Binding ELISA.

[0409] Direct-binding ELISAs were performed as described previously (Bonsignori et al., 2011) with the following modifications: plates were blocked for 1 h at room temperature (RT) or overnight at 4° C. (both procedures were previously validated); primary purified antibodies were tested at a starting concentrations of 100 μg/ml, serially three-fold diluted and incubated for 1 h at RT; HRP-conjugated human IgG antibody was added at optimized concentration of 1:30,000 in assay diluent for 1 hour and developed using TMB substrate; plates were read at 450 nm in a SpectraMax 384 PLUS reader (Molecular Devices, Sunnyvale, Calif.); results are reported as logarithm area under the curve (LogAUC) unless otherwise noted.

[0410] For cell culture supernatant screening of RSC3 and RSC3 Δ371 I HIV-1 Env core proteins reactivity, plates were coated with streptavidin (2 μg/ml); blocked plates were stored at −20° C. until used; 10 μl/well of biotinylated avi-tagged RSC3 and RSC3 Δ371I were added at 2 μg/ml for 30 minutes at RT and culture supernatants were added at 1:3 dilution in assay diluent; plates were developed for 10 min using SureBlue Reserve TMB (53-00-03; KPL, Gaithersburg, Md.) equilibrated at RT.

[0411] Competition ELISAs were performed using 10 μl of primary purified monoclonal antibody, starting at 100 μg/ml and diluted in a two-fold concentration, incubated for 1 h at RT; for CD4 binding site blocking assays, 10 μl of a saturating concentration soluble CD4 (Progenics Pharm Inc.) was added following antibody incubation step. Ten μl of biotinylated target Mab was added at the EC50 determined by a direct binding of biotinylated-Mab for one hour at RT. After background subtractions, percent inhibition was calculated as follows: 100−(sera triplicate mean/no inhibition control mean)*100.

[0412] Autoimmune purified antigens histones (whole), Jo-1, RNP/Sm, Scl-70, Sm, SSA (Ro), SSB (all from ImmunoVision) and centromere B (Prospec) were coated at optimal concentrations determined by lot-specific checkerboard with positive controls. All plasma antibody positive controls were purchased from ImmunoVision; lot-specific optimal ranges for standard curves were determined. All antibodies were tested using the same lots for each antigen and positive controls with the protocol described above. For DNA ELISA, plates were coated with 2 μg/ml poly-lysine (Sigma-Aldrich) for 2 h at RT, washed 3× with PBS and blocked with PBS/2% BSA/0.05% Tween-20 for 2 h at RT. After 3× wash, DNA (LS002195, Worthington) in saline sodium citrate buffer was added for 1 h, washed and antibodies were incubated for 1 h. Secondary antibody was diluted in PBS/0.05% Tween-20. Plates were developed for 30 min. Human recombinant monoclonal antibody Ab008391 (courteously provided by David Easterhoff, Duke Human Vaccine Institute) was used as positive control. For all autoantigen ELISAs, palivizumab was used as negative control. For each antibody, LogAUC was calculated and data are presented semi-quantitatively: no binding=logAUC_{Ab}<2× negative control logAUC_{neg ctrl}; to quantify antibody binding we divided (logAUC_{pos ctrl}−2× logAUC_{neg ctrl}) in tertiles and expressed test antibody binding as weak (+), intermediate (++) or strong (+++) if logAUC_{Ab} was in the first, second or higher tertile, respectively.

[0413] Anti-cardiolipin ELISA was performed using the QUANTA Lite ACA IgG III kit (708625; NOVA Diagnostics) following manufacturer's protocol.

[0414] Assessment of Virus Neutralization Using a Large Panel and Calculation of Neutralization Dendrograms.

[0415] Neutralizing antibody assays in TZM-bl cells were performed as described previously (Montefiori, 2005). Neutralization breadth of CH235 UCA, CH235, CH235.9 and CH235.12 neutralization breadth was assessed using the 384-well plate declination of the assay using an updated panel of 199 geographically and genetically diverse Env-pseudoviruses representing the major circulating genetic subtypes and recombinant forms as described (Seaman et al., 2010; Wu et al., 2010). The data were calculated as a reduction in luminescence units compared with control wells, and reported as IC₅₀ in μg/ml (Montefiori, 2005).

[0416] Dendrograms were calculated using the neighbor-joining method, showing the protein sequence distance from the HIV-1 Env gp160 sequences of 190 HIV-1 primary isolates. The clades of HIV-1, including circulating recombinant forms (CRFs) are indicated.

[0417] Antibody Neutralization Fingerprinting Analysis.

[0418] Neutralization fingerprints were computed and compared for CH235, CH235.9 and CH235.12 from the CH235 lineage, other CD4-binding-site antibodies, and antibodies targeting other sites of vulnerability on HIV-1 Env. The fingerprints were computed over a common panel of 165 HIV-1 strains with neutralization data for all antibodies, and a hierarchical clustering procedure was applied for building the tree, as described in (Georgiev et al., 2013). Briefly, for each antibody, the neutralization data for the common set of 165 HIV-1 strains formed that antibody's neutralization fingerprint. The Spearman correlation coefficients for all pairs of antibody neutralization fingerprints were then computed, transforming the antibody-virus neutralization matrix into an antibody-antibody correlation matrix. This correlation matrix was then input into a hierarchical clustering procedure as a way to visualize the similarities between the neutralization fingerprints for the different antibodies. The distances in the resulting tree are thus a function of the differences between fingerprints.

[0419] VH1-46 and VH1-2 Antibody Dendrogram Calculation.

[0420] Phylogenic trees for multiple antibodies derived from VH1-46 and VH1-2 heavy chain variable genes were calculated using the neighbor-joining method. The sequences are aligned by Clustal Omega, calculated using ClustalW2. Dendrograms were drawn in Figtree.

[0421] Production and Purification of HIV-1 Env Protein Complexed to Antigen-Binding Fragments.

[0422] HIV-1 gp120 protein from clade AE 93TH057 and antibodies of CH235, CH235.9 and CH235.12 were produced and purified as described previously (Zhou et al., 2010). Fab fragments of antibodies were prepared by digesting purified IgG with Lys-C at 37° C. for 2-4 h. The digestion reaction was quenched by the addition of cOmplete protase inhibitors (Roche). The digested antibodies were passed over Protein A agarose to remove the Fc fragment. The Fab was further purified over a Superdex 200 gel filtration column and concentrated aliquots were stored at −80° C.

[0423] X-Ray Crystallography.

[0424] The gp120-antibody complexes were formed by mixing deglycosylated gp120 with the antibody Fab in a 1:1.5 molar ratio. The complexes were purified by size exclusion chromatography (Hiload 26/60 Superdex S200 prep grade; GE Healthcare) with buffer containing 0.35 M NaCl, 2.5 mM Tris (pH 7.0), and 0.02% NaN₃. Fractions with gp120-antibody complexes were concentrated to ˜10 mg/ml and used for crystallization experiments. All gp120-Fab complexes were screened against 576 crystallization conditions using a Cartesian Honeybee crystallization robot. Initial crystals were grown by the vapor diffusion method in sitting drops at 20° C. by mixing 0.2 μl of protein complex with 0.2 μl of reservoir solution. Crystals were manually reproduced in hanging drops by mixing 0.50 μl protein complex solution with 0.5 μl reservoir solution.

[0425] The 93TH057 coreₑ gp120-CH235 complex was crystallized with a reservoir solution of 25% (w/v) of PEG2000, 0.2 M of Li₂SO₄, 0.1 M of Tris-HCl pH 8.5 and 5% (v/v) of isopropanol and was flash frozen in liquid nitrogen in mother liquor supplemented with 15% of 2R,3R-butanediol as a cryoprotectant. The 93TH057 coreₑ gp120-CH235.9 complex was crystallized with a reservoir solution of 9% (w/v) of PEG8000, 19% (w/v) of PEG400, 0.1 M HEPES pH 7.5 and was flash frozen in mother liquor supplemented with an additional 15% PEG 400 as a cryoprotectant. The 93TH057 coreₑ gp120-CH235.12 complex was crystallized with a reservoir solution of 10% PEG 8000, 20% PEG 400 and 100 mM HEPES, pH7.5 and was flash frozen in mother liquor supplemented with an additional 15-20% PEG 400 as a cryoprotectant.

[0426] Data for all crystals were collected at a wavelength of 1.00 Å at SER-CAT beamlines ID-22 and BM-22 (Advanced Photon Source, Argonne National Laboratory). All diffraction data were processed with the HKL2000 suite, structures were solved by molecular replacement using PHASER, and iterative model building and refinement were performed in COOT and PHENIX, respectively. For 93TH057coreₑ complexes with CH235.9 and CH235.12, molecular replacement solutions were obtained using EAF31403.1-CH235 complex as a search model.

[0427] Throughout the refinement processes, a cross validation (R_{free}) test set consisting of 5% of the data was used and hydrogen atoms were included in the refinement model. Structure validations were performed periodically during the model building/refinement process with MolProbity. The 93TH057 coreₑ-CH235 structure was refined to a final R_{free} value of 22.9% with 96% residues in the favored region of the Ramachandran plot, and 0.1% outliers. The 93TH057 coreₑ-CH235.9 structure was refined to a final R_{free} value of 22% with 97.1% residues in the favored region of the Ramachandran plot, and 0% outliers. The 93TH057 coreₑ-CH235.12 structure was refined to a final R_{free} value of 23% with 97.0% residues in the favored region of the Ramachandran plot, and 0.1% outliers. All figures containing representations of the protein crystal structures were made with PyMOL. Gp120 and antibody interactions were analyzed with the PISA server.

[0428] Surface Plasmon Resonance Affinity and Kinetics Measurements.

[0429] For kinetic measurement, each antibody was captured on an anti-human IgFc immobilized sensor surface (200-500RU) and gp120 proteins at varying concentrations were injected to monitor association and dissociation phases. Buffer reference and non-specific binding to a control antibody (palivizumab) captured surface were used to derive specific binding signals. Kinetic rate constants and dissociation constant (Kd) were derived from global curve fitting analysis using a Langmuir 1:1 interaction model using the BIAevaluation 4.1 software (GE Healthcare).

[0430] Electron Microscopy Data Collection and Processing.

[0431] BG505 SOSIP.664 and B41 SOSIP.664 gp140 trimers were expressed in HEK293F cells and purified by 2G12-affinity and gel filtration chromatography as described elsewhere (Pugach et al., 2015; Sanders et al., 2013).Trimers were incubated with a 10 molar excess of Fab (CH235, CH235.9, or CH235.12) overnight at room temperature and the complexes were diluted to ˜0.03 mg/mL prior to application onto a carbon-coated 400 Cu mesh grid that had been glow discharged at 20 mA for 30 s. The grids were stained with 2% (w/v) uranyl formate for 60 seconds. Samples were imaged using a FEI Tecnai T12 electron microscope operating at 120 keV, with an electron dose of ˜25 e⁻/Å² and a magnification of 52,000× that resulted in a pixel size of 2.05 Å at the specimen plane. Images were acquired with Leginon (Suloway et al., 2005) using a Tietz TemCam-F416 CMOS camera with a nominal defocus range of 1000-1500 nm. Automated particle picking, stack creation, and initial 2D classification was performed in the Appion software suite (Lander et al., 2009). Noise and junk particles were discarded and the remaining stack was subjected to 3D classification using Relion (Scheres, 2012) with an EM volume created from the x-ray structure of ligand-free BG505 SOSIP.664 (PDB: 4zmj) low pass filtered to 60 Å as the reference model. While both CH235.9 and CH235.12 bound to either B41 or BG505 at predominantly full stoichiometry (3 Fabs per trimer), CH235 bound to either trimer at sub-stoichiometric ratios (1 Fab per BG505 trimer and 2 Fabs per B41 trimer). The 3D classes representing the predominant stoichiometry for each complex were used as the initial models (low pass filtered to 40 Å) for further refinement using Relion, with C3 symmetry imposed for complexes with CH235.9 or CH235.12. The total number of particles used in refinement and final resolution of the map using a Fourier shell correlation of 0.5 are as follows: BG505 in complex with CH235-3,467 particles (˜25 Å); B41 in complex with CH235-4,248 particles (˜24 Å); BG505 in complex with CH235.9-2,567 particles (25 Å); B41 in complex with CH235.9-8,061 particles (19 Å); BG505 in complex with CH235.12-15,565 particles (17 Å); B41 in complex with CH235.12-17,023 particles (16 Å).

[0432] To create figures of each Fab in complex with a representative trimer, the 3D reconstructions for each complex were fit into an EM volume created from the x-ray structure of unliganded BG505 SOSIP.664 (PDB: 4ZMJ) low pass filtered to 30 Å in UCSF Chimera (Pettersen et al., 2004) and using the “segment map” option to isolate the density of the Fab components alone. Two-dimensional back projections of the final 3D models were generated using EMAN (Tang et al., 2007).

[0433] Epitope Visualization.

[0434] The HIV-1 gp120 epitopes targeted by donor CH235 antibodies were visualized using PyMOL (Schrodinger, 2010). In this graphic program, we used 5.5-A distance for selection of epitope atom sets which were virtually identical to those defined by protein interface analysis program PISA.

[0435] Monoclonal Antibody CH235.9 Amino Acid Reversion.

[0436] Primers were designed with the online Agilent Quikchange primer designer tool (www.thermofisher.com) and were as follows:

CH235.9_{N30T}:
CGTGGCGTCTGGATACAACTTCACCGACTACTATATAC;
CH235.9_{D31T}:
CGTCTGGATACAACTTCAACACCTACTATATACACTGGGTGC;
CH235.9_{G62Q}:
GGTCGCACAGATTACGCACAGGCGTTTGGGGA;
CH235.9_{G65Q}:
GATTACGCAGGGGCGTTTCAGGACAGAGTGTCCA;
CH235.9_{A103E}:
GTTAGAAATGTGGGAACGGAGGGCAGCTTGCTCCACTATG;
CH235.9_{G62Q/G65Q}:
GGTCGCACAGATTACGCACAGGCGTTTCAGGACAGAGTGTCCA;
CH235.9_{S54R}:
GGATCGACCCTAGGGGTGGTCGCACAG;
CH235.9_{A61S}:
GTGGTCGCACAGATTACTCAGGGGCGTTTG.

[0437] Presence of mutations in plasmid products was confirmed by single-colony sequencing.

[0438] Structural Bioinformatics.

[0439] Average buried surface area (BSA) on gp120 was calculated for residues with BSA>1 Å² for the gp120-antibody complexes, and the corresponding antibody neutralization potencies were averaged for each of those residues based on data from neutralization assays. Spearman correlation between BSA on gp120 and antibody potencies was calculated for BSA cutoffs=0 to 85 Å² and potency logIC₅₀ cutoffs=0.60 to 1.62 μg/ml.

[0440] Sample Preparation for 5′ RACE Method and 454 Pyrosequencing.

[0441] Human PBMCs (6×10⁷) were obtained from three HIV-1 and hepatitis C negative individuals (LP32647, LP08248 and LP23810). A 5′RACE approach was developed to amplify immunoglobulin genes based on previously described methods (Venturi et al., 2011). Briefly, the PBMCs were pelleted at 1200 rpm for 8 min. mRNA was then extracted and eluted in 50 μl elution buffer using μMACS mRNA isolation kit (Miltenyi Biotec) according to manufacturer's instructions. To synthesize cDNA, 10 μl mRNA was mixed with 1 μl 5′CDS Oligo dT primers (12 04) and incubated at 70° C. for 1 min and then −20° C. for 1 min. Then 1 μl SMARTER Oligo Primer (12 μM) (Clontech), 4 μl 5×RT buffer, 1 μl DTT 20 (20 mM), 1 μl dNTP (10 mM), 1 μl RNAse out and 1 μl SuperScript II reverse transcriptase (Invitrogen) were added to the reaction. After 2 hours incubation at 42° C., the cDNA products were purified using Nucleospin II kit (Macherey-Nagel) and eluted in 50 μl water. 454 pyrosequencing was performed as described previously (Wu et al., 2011). The first PCR amplification was performed with a common 5′ primer II A (Clontech) and an Ig gene specific 3′ primer (5′GGGGAAGACCGATGGGCCCTTGGTGG3′) using KAPA HIFI qPCR kit (Kapa Biosystems). The PCR products were purified with 2% Size Select Clonewell E-gel (Invitrogen) and Agencourt AMPure XP beads (Beckman Coulter). The second PCR amplification was performed with primers with 454 sequencing adapters (454-RACE-F: 5′CCATCTCATCCCTGCGTGTCTCCGACTCAGAAGCAGTGGTATCAACGCAGAGT3′; 454-IgG-R: 5′CCTATCCCCTGTGTGCCTTGGCAGTCTCAGGGGGAAGACCGATGGGCCCTTGGT GG3′). The PCR products were again purified with 2% Size Select Clonewell E-gel and Agencourt AMPure XP beads.

[0442] Germline V Gene Specific Substitution Profile.

[0443] The raw reads from three healthy donors shorter than 300 nucleotides or longer than 600 nucleotides in length were not analyzed. Germline V gene was then assigned to each read using an in-house bioinformatics pipeline (Wu et al., 2015). We removed reads containing stop codons. Functional reads were then clustered using Usearch at 97% sequence identity, and one unique sequence was selected from each cluster to derive a curated dataset. To further reduce reads containing sequencing errors in the curated dataset, unique sequences having only one read in the clustering step were excluded. Finally, the curated dataset of the three donors were pooled for substitution frequency analyses.

[0444] Reads from the curated dataset that were assigned to germline V genes of interest were extracted, and were aligned using MUSCLE (Edgar, 2004). The amino acid substitution frequency or mutability of a V gene position was calculated by counting how many reads contain amino acids that are different from the germline V gene, and normalized by the total number of reads. We further calculated the frequency of the 19 types of amino acid substitutions at a position, which was used to generate positional substitution logo. The similarity of positional substitution frequency profiles between V genes of interest was measured by Pearson correlation coefficient.

[0445] Conformity Analysis.

[0446] The positional conformity of a conforming antibody sequence A to a reference sequence B is defined as the number of mutated positions shared by both sequences divided by the total number of mutations in the conforming sequence. Thus:

$${c}_{p} ( A ; B ) = \frac{\vert {M}_{A} ⋂ {M}_{B} \vert}{\vert {M}_{A} \vert}$$

[0447] where Mᵢ represents the set of amino acid positions in sequence i which are mutated from the germline V residue. Insertions and missing data are ignored, but deletions relative to the germline V are counted as mutations. For 8ANC131 and CH235 (Figure S3A): M_{8ANC131}={2, 9, 10, 11, 16, 19, 20, 23, 26, 30, 31, 32, 33, 34, 37, 45, 46, 48, 50, 52, 53, 55, 57, 58, 59, 60, 62, 63, 66, 68, 69, 70, 71, 74, 77, 80, 84, 85, 88, 89} M_{CH235}={19, 23, 31, 34, 46, 47, 50, 52, 55, 57, 59, 63, 68, 83, 84} M_{8ANC131}∩M_{CH235}={19, 23, 31, 34, 46, 50, 52, 55, 57, 59, 63, 68, 84} cₚ(8ANC131, CH235)=13/15=86.7%

[0448] Identity conformity was defined the number of positionally conforming sites in conforming antibody A which were also mutated to the same residue as in the reference antibody B. Thus:

$${c}_{i} ( A ; B ) = \frac{{\sum }_{x ∈ \{ {M}_{A} ⋂ {M}_{B} \}} {δ}_{{A}_{x} {B}_{x}}}{\vert {M}_{A} \vert}$$

where δ is the Kronecker delta function and Aₓ is the identity of the residue at position x of sequence A. For 8ANC131 and CH235 (Figure S3B): cᵢ(8ANC131, CH235)=4/15=26.7%

[0449] Targeting Precision of CD4bs-Directed Antibodies.

[0450] The targeting precision of the CD4bs-directed antibodies was defined as the buried surface area inside of the CD4 binding site minus the buried surface area outside of the CD4 binding site. The buried surface area of each antigen residue was determined by NACCESS. The buried surface area from the following residue numbers were considered inside of the CD4 binding site: 257, 279, 280, 281, 282, 283, 365, 366, 367, 368, 370, 371, 455, 456, 457, 458, 459, 460, 469, 472, 473, 474, 475, 476, and 477 (Zhou et al., 2007). The buried surface areas from the rest of the residues were considered outside of the CD4 binding site. Somatic hypermutation was defined using nucleotide sequences and P values were calculated based on linear regression.

[0451] Antibody Binding Orientation Calculation.

[0452] To calculate the relative rotation angles and translation to gp120-bound CD4 for gp120-bound CD4-binding site antibodies, all antibody-gp120 complexes to be analyzed were first superposed over the outer domain of gp120 (residue ranges: 252-392, 412-422, 437-476) with gp120 in its CD4 complex (PDB ID: 2NXY). The calculations of rotation angles and translation were then carried out with the gp120-aligned structures. For comparison of position of heavy chain variable domain relative to gp120-bound CD4, the frame work regions (residues 46-52, 56-59, 66-71 and 76-82) were superimposed to regions of CD4 domain 1 (residues 34-40, 43-46, 54-59, 65-71). The superposition procedures were performed with the Superpose Molecules module in CCP4 (Collaborative Computational Project, 1994). The Chi angle and distance between centroids in the Superpose output was taken as the rotation angle and translation distance between CD4 and a CD4-binding site antibody.

### SUPPLEMENTAL REFERENCES

[0453] Collaborative Computational Project (1994). The CCP4 suite: programs for protein crystallography. Acta Crystallogr., Sect D: Biol. Crystallogr. 50, 760-763.
[0454] Edgar, R. C. (2004). MUSCLE: multiple sequence alignment with high accuracy and high throughput. Nucleic Acids Res. 32, 1792-1797.
[0455] Giorgi, E. E., Funkhouser, B., Athreya, G., Perelson, A. S., Korber, B. T., Bhattacharya, T. (2010). Estimating time since infection in early homogeneous HIV-1 samples using a poisson model. BMC Bioinformatics 11, 532.
[0456] Gray, E. S., Moody, M. A., Wibmer, C. K., Chen, X., Marshall, D., Amos, J., Moore, P. L., Foulger, A., Yu, J. S., Lambson, B., et al. (2011). Isolation of a monoclonal antibody that targets the alpha-2 helix of gp120 and represents the initial autologous neutralizing-antibody response in an HIV-1 subtype C-infected individual. J. Virol. 85, 7719-7729.
[0457] Lander, G. C., Stagg, S. M., Voss, N. R., Cheng, A., Fellmann, D., Pulokas, J., Yoshioka, C., Irving, C., Mulder, A., Lau, P. W., et al. (2009). Appion: an integrated, database-driven pipeline to facilitate EM image processing. J. Struct. Biol. 166, 95-102.
[0458] Montefiori, D. C. (2005). Evaluating neutralizing antibodies against HIV, SIV, and SHIV in luciferase reporter gene assays. Current protocols in immunology/edited by John E Coligan [et al] Chapter 12, Unit 12 11.
[0459] Pettersen, E. F., Goddard, T. D., Huang, C. C., Couch, G. S., Greenblatt, D. M., Meng, E. C., and Ferrin, T. E. (2004). UCSF Chimera—a visualization system for exploratory research and analysis. J. Comput. Chem. 25, 1605-1612.
[0460] Scheres, S. H. (2012). A Bayesian view on cryo-EM structure determination. J. Mol. Biol. 415, 406-418.
[0461] Seaman, M. S., Janes, H., Hawkins, N., Grandpre, L. E., Devoy, C., Giri, A., Coffey, R. T., Harris, L., Wood, B., Daniels, M. G., et al. (2010). Tiered categorization of a diverse panel of HIV-1 Env pseudoviruses for assessment of neutralizing antibodies. J. Virol. 84, 1439-1452.
[0462] Schrodinger, LLC (2010). The PyMOL Molecular Graphics System, Version 1.3r1.
[0463] Suloway, C., Pulokas, J., Fellmann, D., Cheng, A., Guerra, F., Quispe, J., Stagg, S., Potter, C. S., and Carragher, B. (2005). Automated molecular microscopy: the new Leginon system. J. Struct. Biol. 151, 41-60.
[0464] Tang, G., Peng, L., Baldwin, P. R., Mann, D. S., Jiang, W., Rees, I., and Ludtke, S. J. (2007). EMAN2: an extensible image processing suite for electron microscopy. J. Struct. Biol. 157, 38-46.
[0465] Tomaras, G, D, Yates, N. L., Liu, P., Qin, L., Fouda, G. G., Chavez, L. L., Decamp, A. C., Parks, R. J., Ashley, V. C., Lucas, J. T., et al. (2008). Initial B-cell responses to transmitted human immunodeficiency virus type 1: virion-binding immunoglobulin M (IgM) and IgG antibodies followed by plasma anti-gp41 antibodies with ineffective control of initial viremia. J. Virol. 82, 12449-12463
[0466] van Dongen, J. J., Langerak, A. W., Bruggemann, M., Evans, P. A., Hummel, M., Lavender, F. L., Delabesse, E., Davi, F., Schuuring, E., Garcia-Sanz, R., et al. (2003). Design and standardization of PCR primers and protocols for detection of clonal immunoglobulin and T-cell receptor gene recombinations in suspect lymphoproliferations: report of the BIOMED-2 Concerted Action BMH4-CT98-3936. Leukemia 17, 2257-2317.
[0467] Venturi, V., Quigley, M. F., Greenaway, H. Y., Ng, P. C., Ende, Z. S., McIntosh, T., Asher, T. E., Almeida, J. R., Levy, S., Price, D. A., et al. (2011). A mechanism for TCR sharing between T cell subsets and individuals revealed by pyrosequencing. J Immunol. 186, 4285-4294.
[0468] Wu, X., Yang, Z. Y., Li, Y., Hogerkorp, C. M., Schief, W. R., Seaman, M. S., Zhou, T., Schmidt, S. D., Wu, L., Xu, L., et al. (2010). Rational design of envelope identifies broadly neutralizing human monoclonal antibodies to HIV-1. Science 329, 856-861.
[0469] Wu, X., Zhang, Z., Schramm, C. A., Joyce, M. G., Kwon, Y. D., Zhou, T., Sheng, Z., Zhang, B., O'Dell, S., McKee, K., et al. (2015). Maturation and Diversity of the VRC01-Antibody Lineage over 15 Years of Chronic HIV-1 Infection. Cell 161, 470-485.
[0470] Zhou, T., Xu, L., Dey, B., Hessell, A. J., Van Ryk, D., Xiang, S. H., Yang, X., Zhang, M. Y., Zwick, M. B., Arthos, J., et al. (2007). Structural definition of a conserved neutralization epitope on HIV-1 gp120. Nature 445, 732-737.

[0471] Accession Numbers

[0472] Coordinates and structure factors for CH235, CH235.9 and CH235.12 in complex with HIV-1 gp120 have been deposited with the Protein Data Bank (PDB ID 5F9W, 5F90 and 5F96). Next-generation sequencing data have been deposited with the NCBI Sequence Reads Archive (SRP067168). Antibody heavy and light chains have been deposited with GenBank (KU570032-KU570053).

[0473] Antibodies Names correlation: See supra.

### REFERENCES FOR EXAMPLE 8

[0474] Alam, S. M., McAdams, M., Boren, D., Rak, M., Scearce, R. M., Gao, F., Camacho, Z. T., Gewirth, D., Kelsoe, G., Chen, P., et al. (2007). The role of antibody polyspecificity and lipid reactivity in binding of broadly neutralizing anti-HIV-1 envelope human monoclonal antibodies 2F5 and 4E10 to glycoprotein 41 membrane proximal envelope epitopes. J. Immunol. 178, 4424-4435.
[0475] Alam, S. M., Morelli, M., Dennison, S. M., Liao, H. X., Zhang, R., Xia, S. M., Rits-Volloch, S., Sun, L., Harrison, S. C., Haynes, B. F., et al. (2009). Role of HIV membrane in neutralization by two broadly neutralizing antibodies. Proc. Natl. Acad. Sci. U.S.A 106, 20234-20239.
[0476] Bonsignori, M., Alam, S. M., Liao, H. X., Verkoczy, L., Tomaras, G. D., Haynes, B. F., and Moody, M. A. (2012). HIV-1 antibodies from infection and vaccination: insights for guiding vaccine design. Trends Microbiol. 20, 532-539.
[0477] Bonsignori, M., Hwang, K. K., Chen, X., Tsao, C. Y., Morris, L., Gray, E., Marshall, D. J., Crump, J. A., Kapiga, S. H., Sam, N. E., et al. (2011). Analysis of a clonal lineage of HIV-1 envelope V2/V3 conformational epitope-specific broadly neutralizing antibodies and their inferred unmutated common ancestors. J. Virol. 85, 9998-10009.
[0478] Bonsignori, M., Wiehe, K., Grimm, S. K., Lynch, R., Yang, G., Kozink, D. M., Perrin, F., Cooper, A. J., Hwang, K. K., Chen, X., et al. (2014). An autoreactive antibody from an SLE/HIV-1 individual broadly neutralizes HIV-1. J. Clin. Invest. 124, 1835-1843.
[0479] Boyd, S. D., Marshall, E. L., Merker, J. D., Maniar, J. M., Zhang, L. N., Sahaf, B., Jones, C. D., Simen, B. B., Hanczaruk, B., Nguyen, K. D., et al. (2009). Measurement and Clinical Monitoring of Human Lymphocyte Clonality by Massively Parallel V-D-J Pyrosequencing. Sci. Transl. Med. 1.
[0480] Dosenovic, P., von Boehmer, L., Escolano, A., Jardine, J., Freund, N. T., Gitlin, A. D., McGuire, A. T., Kulp, D. W., Oliveira, T., Scharf, L., et al. (2015). Immunization for HIV-1 Broadly Neutralizing Antibodies in Human Ig Knockin Mice. Cell 161, 1505-1515.
[0481] Felsenstein, J. (2005). PHYLIP (Phylogeny Inference Package), 3.6a3 edn (Seattle, Wash.: distributed by the author: Department of Genome Sciences, University of Washington).
[0482] Foote, J., and Milstein, C. (1991). Kinetic maturation of an immune response. Nature 352, 530-532.
[0483] Gao, F., Bonsignori, M., Liao, H. X., Kumar, A., Xia, S. M., Lu, X., Cai, F., Hwang, K. K., Song, H., Zhou, T., et al. (2014). Cooperation of B cell lineages in induction of HIV-1-broadly neutralizing antibodies. Cell 158, 481-491.
[0484] Georgiev, I. S., Doria-Rose, N. A., Zhou, T. Q., Do Kwon, Y., Staupe, R. P., Moquin, S., Chuang, G. Y., Louder, M. K., Schmidt, S. D., Altae-Tran, H. R., et al. (2013). Delineating Antibody Recognition in Polyclonal Sera from Patterns of HIV-1 Isolate Neutralization. Science 340, 751-756.
[0485] Haynes, B. F. (2015). New approaches to HIV vaccine development. Curr. Opin. Immunol. 35, 39-47.
[0486] Haynes, B. F., and Bradley, T. (2015). Broadly Neutralizing Antibodies and the Development of Vaccines. JAMA 313, 2419-2420.
[0487] Haynes, B. F., Fleming, J., St Clair, E. W., Katinger, H., Stiegler, G., Kunert, R., Robinson, J., Scearce, R. M., Plonk, K., Staats, H. F., et al. (2005). Cardiolipin polyspecific autoreactivity in two broadly neutralizing HIV-1 antibodies. Science 308, 1906-1908.
[0488] Haynes, B. F., Kelsoe, G., Harrison, S. C., and Kepler, T. B. (2012). B-cell-lineage immunogen design in vaccine development with HIV-1 as a case study. Nat. Biotechnol. 30, 423-433.
[0489] Haynes, B. F., and Verkoczy, L. (2014). AIDS/HIV. Host controls of HIV neutralizing antibodies. Science 344, 588-589.
[0490] Hraber, P., Korber, B., Wagh, K., Giorgi, E. E., Bhattacharya, T., Gnanakaran, S., Lapedes, A. S., Learn, G. H., Kreider, E. F., Li, Y., et al. (2015). Longitudinal Antigenic Sequences and Sites from Intra-Host Evolution (LASSIE) Identifies Immune-Selected HIV Variants. Viruses 7, 5443-5475.
[0491] Hraber, P., Seaman, M. S., Bailer, R. T., Mascola, J. R., Montefiori, D. C., and Korber, B. T. (2014). Prevalence of broadly neutralizing antibody responses during chronic HIV-1 infection. AIDS 28, 163-169.
[0492] Jardine, J., Julien, J. P., Menis, S., Ota, T., Kalyuzhniy, O., McGuire, A., Sok, D., Huang, P. S., MacPherson, S., Jones, M., et al. (2013). Rational HIV immunogen design to target specific germline B cell receptors. Science 340, 711-716.
[0493] Jardine, J. G., Ota, T., Sok, D., Pauthner, M., Kulp, D. W., Kalyuzhniy, O., Skog, P. D., Thinnes, T. C., Bhullar, D., Briney, B., et al. (2015). HIV-1 VACCINES. Priming a broadly neutralizing antibody response to HIV-1 using a germline-targeting immunogen. Science 349, 156-161.
[0494] Keele, B. F., Giorgi, E. E., Salazar-Gonzalez, J. F., Decker, J. M., Pham, K. T., Salazar, M. G., Sun, C., Grayson, T., Wang, S., Li, H., et al. (2008). Identification and characterization of transmitted and early founder virus envelopes in primary HIV-1 infection. Proc. Natl. Acad. Sci. U.S.A 105, 7552-7557.
[0495] Kepler, T. B. (2013). Reconstructing a B-cell clonal lineage. I. Statistical inference of unobserved ancestors. F1000Res 2, 103.
[0496] Kepler, T. B., Munshaw, S., Wiehe, K., Zhang, R., Yu, J. S., Woods, C. W., Denny, T. N., Tomaras, G. D., Alam, S. M., Moody, M. A., et al. (2014). Reconstructing a B-Cell Clonal Lineage. II. Mutation, Selection, and Affinity Maturation. Front. Immunol. 5, 170.
[0497] Klein, F., Diskin, R., Scheid, J. F., Gaebler, C., Mouquet, H., Georgiev, I. S., Pancera, M., Zhou, T., Incesu, R. B., Fu, B. Z., et al. (2013). Somatic mutations of the immunoglobulin framework are generally required for broad and potent HIV-1 neutralization. Cell 153, 126-138.
[0498] Liao, H. X., Lynch, R., Zhou, T., Gao, F., Alam, S. M., Boyd, S. D., Fire, A. Z., Roskin, K. M., Schramm, C. A., Zhang, Z., et al. (2013). Co-evolution of a broadly neutralizing HIV-1 antibody and founder virus. Nature 496, 469-476.
[0499] Liu, M., Yang, G., Wiehe, K., Nicely, N. I., Vandergrift, N. A., Rountree, W., Bonsignori, M., Alam, S. M., Gao, J., Haynes, B. F., et al. (2015). Polyreactivity and autoreactivity among HIV-1 antibodies. J. Virol. 89, 784-798.
[0500] Mascola, J. R., and Haynes, B. F. (2013). HIV-1 neutralizing antibodies: understanding nature's pathways. Immunol. Rev. 254, 225-244.
[0501] McDonald, I. K., and Thornton, J. M. (1994). Satisfying hydrogen bonding potential in proteins. J. Mol. Biol. 238, 777-793.
[0502] McGuire, A. T., Hoot, S., Dreyer, A. M., Lippy, A., Stuart, A., Cohen, K. W., Jardine, J., Menis, S., Scheid, J. F., West, A. P., et al. (2013). Engineering HIV envelope protein to activate germline B cell receptors of broadly neutralizing anti-CD4 binding site antibodies. J. Exp. Med. 210, 655-663.
[0503] Otwinowski, Z., and Minor, W. (1997). Processing of X-ray diffraction data collected in oscillation mode. Method Enzymol. 276, 307-326.
[0504] Pugach, P., Ozorowski, G., Cupo, A., Ringe, R., Yasmeen, A., de Val, N., Derking, R., Kim, H. J., Korzun, J., Golabek, M., et al. (2015). A native-like SOSIP.664 trimer based on an HIV-1 subtype B env gene. J. Virol. 89, 3380-3395.
[0505] Rudicell, R. S., Do Kwon, Y., Ko, S. Y., Pegu, A., Louder, M. K., Georgiev, I. S., Wu, X. L., Zhu, J., Boyington, J. C., Chen, X. J., et al. (2014) Enhanced Potency of a Broadly Neutralizing HIV-1 Antibody In Vitro Improves Protection against Lentiviral Infection In Vivo. J. Virol. 88, 12669-12682.
[0506] Sanders, R. W., Derking, R., Cupo, A., Julien, J. P., Yasmeen, A., de Val, N., Kim, H. J., Blattner, C., de la Pena, A. T., Korzun, J., et al. (2013). A next-generation cleaved, soluble HIV-1 Env trimer, BG505 SOSIP.664 gp140, expresses multiple epitopes for broadly neutralizing but not non-neutralizing antibodies. PLoS Pathog. 9, el003618.
[0507] Scheid, J. F., Mouquet, H., Feldhahn, N., Seaman, M. S., Velinzon, K., Pietzsch, J., Ott, R. G., Anthony, R. M., Zebroski, H., Hurley, A., et al. (2009). Broad diversity of neutralizing antibodies isolated from memory B cells in HIV-infected individuals. Nature 458, 636-640.
[0508] Scheid, J. F., Mouquet, H., Ueberheide, B., Diskin, R., Klein, F., Oliveira, T. Y., Pietzsch, J., Fenyo, D., Abadir, A., Velinzon, K., et al. (2011). Sequence and structural convergence of broad and potent HIV antibodies that mimic CD4 binding. Science 333, 1633-1637.
[0509] Sui, Z. W., Chen, Q. J., Wu, R., Zhang, H. B., Zheng, M., Wang, H. Z., and Chen, Z. (2010). Cross-protection against influenza virus infection by intranasal administration of M2-based vaccine with chitosan as an adjuvant. Arch. Virol. 155, 535-544.
[0510] Verkoczy, L., Chen, Y., Zhang, J., Bouton-Verville, H., Newman, A., Lockwood, B., Scearce, R. M., Montefiori, D. C., Dennison, S. M., Xia, S. M., et al. (2013). Induction of HIV-1 broad neutralizing antibodies in 2F5 knock-in mice: selection against membrane proximal external region-associated autoreactivity limits T-dependent responses. J. Immunol. 191, 2538-2550.
[0511] Verkoczy, L., Diaz, M., Holl, T. M., Ouyang, Y. B., Bouton-Verville, H., Alam, S. M., Liao, H. X., Kelsoe, G., and Haynes, B. F. (2010). Autoreactivity in an HIV-1 broadly reactive neutralizing antibody variable region heavy chain induces immunologic tolerance. Proc. Natl. Acad. Sci. U.S.A 107, 181-186.
[0512] Verkoczy, L., Kelsoe, G., Moody, M. A., and Haynes, B. F. (2011). Role of immune mechanisms in induction of HIV-1 broadly neutralizing antibodies. Curr. Opin. Immunol. 23, 383-390.
[0513] Wu, X., Yang, Z. Y., Li, Y., Hogerkorp, C. M., Schief, W. R., Seaman, M. S., Zhou, T., Schmidt, S. D., Wu, L., Xu, L., et al. (2010). Rational design of envelope identifies broadly neutralizing human monoclonal antibodies to HIV-1. Science 329, 856-861.
[0514] Wu, X., Zhou, T., Zhu, J., Zhang, B., Georgiev, I., Wang, C., Chen, X., Longo, N. S., Louder, M., McKee, K., et al. (2011). Focused evolution of HIV-1 neutralizing antibodies revealed by structures and deep sequencing. Science 333, 1593-1602.
[0515] Yang, G., Holl, T. M., Liu, Y., Li, Y., Lu, X., Nicely, N. I., Kepler, T. B., Alam, S. M., Liao, H. X., Cain, D. W., et al. (2013). Identification of autoantigens recognized by the 2F5 and 4E10 broadly neutralizing HIV-1 antibodies. J. Exp. Med. 210, 241-256.
[0516] Zhou, T., Georgiev, I., Wu, X., Yang, Z. Y., Dai, K., Finzi, A., Kwon, Y. D., Scheid, J. F., Shi, W., Xu, L., et al. (2010). Structural basis for broad and potent neutralization of HIV-1 by antibody VRC01. Science 329, 811-817.
[0517] Zhou, T., Lynch, R. M., Chen, L., Acharya, P., Wu, X., Doria-Rose, N. A., Joyce, M. G., Lingwood, D., Soto, C., Bailer, R. T., et al. (2015). Structural Repertoire of HIV-1-Neutralizing Antibodies Targeting the CD4 Supersite in 14 Donors. Cell 161, 1280-1292.

### Example 9: HIV-1 Envelope Trimers and Other Envelope Designs

[0518] This example shows that stabilized HIV-1 Env trimer immunogens show enhanced antigenicity for broadly neutralizing antibodies, and are not recognized by non-neutralizing antibodies. See also FIGS. 22-25 and 61-74. The example also describes additional envelope modifications and designs. In some embodiments these envelopes, including but not limited to trimers are further multimerized, and/or used as particulate, high-density array in liposomes or other particles, for example but not limited to nanoparticles. Any one of the envelopes of the invention could be designed and expressed as described herein.

[0519] A stabilized chimeric SOSIP.III design was used to generate 10 CH505 trimers. The CH505 TF SOSIP.III bound the CH103 UCA. Binding affinity of the CH103 lineage to the CH505 TF SOSIP.III correlates with neutralization potency against CH505 TF virus. This design was applicable to diverse viruses from multiple clades.

[0520] These results indicate that the native trimer on virions could have initiated the CH103 lineage during natural infection. CH103 recognizes all three protomers on the Env trimer. The SOSIP.III mimicked the native trimer on the virion in that stronger binding to it correlated with neutralization potency for the CH103 lineage. The SOSIP.III design enables soluble mimics of the native trimer to be tested as sequential immunogens in CH505 B cell lineage design vaccination. These trimers enable our efforts to utilize B cell lineage design with trimeric immunogens.

[0521] Elicitation of neutralizing antibodies is one goal for antibody-based vaccines. Neutralizing antibodies target the native trimeric HIV-1 Env on the surface virions. The trimeric HIV-1 envelope protein consists of three protomers each containing a gp120 and gp41 heterodimer. Recent immunogen design efforts have generated soluble near-native mimics of the Env trimer that bind to neutralizing antibodies but not non-neutralizing antibodies. The recapitulation of the native trimer could be a key component of vaccine induction of neutralizing antibodies. Neutralizing Abs target the native trimeric HIV-1 Env on the surface of viruses (Poignard et al. J Virol. 2003 January; 77(1):353-65; Parren et al. J Virol. 1998 December; 72(12):10270-4.; Yang et al. J Virol. 2006 November; 80(22):11404-8.). The HIV-1 Env protein consists of three protomers of gp120 and gp41 heterodimers that are noncovalently linked together (Center et al. J Virol. 2002 August; 76(15):7863-7.). Soluble near-native trimers preferentially bind neutralizing antibodies as opposed to non-neutralizing antibodies (Sanders et al. PLoS Pathog. 2013 September; 9(9): e1003618).

[0522] Sequential Env vaccination has elicited broad neutralization in the plasma of one macaque (Example 5A). The overall goal of our project is to increase the frequence of vaccine induction of bnabs in the plasma of primates with sequential Env vaccination. We hypothesized that vaccination with sequential immunogens that target bnAb B cell lineage and mimic native trimers will increase the frequency of broadly neutralizing plasma antibodies. One goal is increase the frequency of vaccine induction of bnAb in the plasma of primates by sequential Env vaccination. It is expected that vaccination with sequential immunogens that target bnAb B cell lineages and mimic the native trimers on virions will increase the frequency of broadly neutralizing plasma antibodies.

[0523] Previous work has shown that CH505 derived soluble trimers are hard to produce. From a study published by Julien et al in 2015 (Proc Natl Acad Sci USA. 2015 Sep. 22; 112(38): 11947-11952.) it was shown that while CH505 produced comparable amounts of protein by transient transfection, only 5% of the CH505 protein formed trimer which 5 times lower than the gold standard viral strain BG505. Provided here are non-limiting embodiments of well-folded trimers for Env immunizations.

[0524] Near-native soluble trimers using the 6R.SOSIP.664 design are capable of generating autologous tier 2 neutralizing plasma antibodies in the plasma (Sanders et al. 2015), which provides a starting point for designing immunogens to elicit broadly neutralizing antibodies. While these trimers are preferentially antigenic for neutralizing antibodies they still possess the ability to expose the V3 loop, which generally results in strain-specific binding and neutralizing antibodies after vaccination. Using the unliganded structure the BG505.6R.SOSIP.664 has been stabilized by adding cysteines at position 201 and 433 to constrain the conformational flexibility such that the V3 loop is maintained unexposed (Kwon et al. Nat Struct Mol Biol. 2015 July; 22(7): 522-531.),

[0525] Immunogen Design.

[0526] Provided are engineered trimeric immunogens derived from multiple viruses from CH505. We generated chimeric 6R.SOSIP.664, chimeric disulfide stabilized (DS) 6R.SOSIP.664 (Kwon et al Nat Struct Mol Biol. 2015 July; 22(7): 522-531.), chimeric 6R.SOSIP.664v4.1 (DeTaeye et al. Cell. 2015 Dec. 17; 163(7):1702-15. doi: 10.1016/j.ce11.2015.11.056), and chimeric 6R.SOSIP.664v4.2 (DeTaeye et al. Cell. 2015 Dec. 17; 163(7):1702-15. doi: 10.1016/j.ce11.2015.11.056). The 6R.SOSIP.664 is the basis for all of these designs and is made as a chimera of C.CH0505 and A.BG505. The gp120 of C.CH505 was fused with the BG505 inner domain gp120 sequence within the alpha helix 5 (α5) to result in the chimeric protein. The chimeric gp120 is disulfide linked to the A.BG505 gp41 as outlined by Sanders et al. (PLoS Pathog. 2013 September; 9(9): e1003618). These immunogens were designed as chimeric proteins that possess the BG505 gp41 connected to the CH505 gp120, since the BG505 strain is particularly adept at forming well-folded, closed trimers (FIG. 22A). This envelope design retains the CH505 CD4 binding site that is targeted by the CH103 and CH235 broadly neutralizing antibody lineages that were isolated from CH505.

[0527] FIGS. 22 and 23 show nucleic acid and amino acid and sequences of various CH505 envelope trimer designs. FIG. 23 B shows an annotated sequence of the SOSIP.III design. Based on the various SOSIP designs, any other suitable envelope, for example but not limited to CH505 envelopes as described in WO2014042669 can be designed.

[0528] Recombinant envelopes as trimers could be produced and purified by any suitable method. For a non-limiting example of purification methods see Ringe R P, Yasmeen A, Ozorowski G, Go E P, Pritchard L K, Guttman M, Ketas T A, Cottrell C A, Wilson I A, Sanders R W, Cupo A, Crispin M, Lee K K, Desaire H, Ward A B, Klasse P J, Moore J P. 2015. Influences on the design and purification of soluble, recombinant native-like HIV-1 envelope glycoprotein trimers. J Virol 89:12189-12210. doi:10.1128/JVI.01768-15.

[0529] Multimeric Envelopes

[0530] Presentation of antigens as prticulates reduces the B cell receptor affinity necessary for signal transduction and expansion (See Baptista et al. EMBO J. 2000 Feb. 15; 19(4): 513-520). Displaying multiple copies of the antigen on a particle provides an avidity effect that can overcome the low affinity between the antigen and B cell receptor. The initial B cell receptor specific for pathogens can be low affinity, which precludes vaccines from being able to stimulate and expand B cells of interest. In particular, very few naïve B cells from which HIV-1 broadly neutralizing antibodies arise can bind to soluble HIV-1 Envelope. Provided are envelopes, including but not limited to trimers as particulate, high-density array on liposomes or other particles, for example but not limited to nanoparticles. See e.g. He et al. Nature Communications 7, Article number: 12041 (2016), doi:10.1038/ncomms12041; Bamrungsap et al. Nanomedicine, 2012, 7 (8), 1253-1271.

[0531] To improve the interaction between the naïve B cell receptor and CH505 SOSIP trimer protein we created to two constructs that can be presented on particles. The first construct was made by fusing HIV-1 Envelope trimer CH505 to ferritin (See FIG. 24G). Ferritin protein self assembles into a small nanoparticle with three fold axis of symmetry. At these axis CH505 envelope protein was fused. Therefore the assembly of the three-fold axis also clusters three HIV-1 envelope protomers together to form an envelope trimer. Each ferritin particle has 6 axises which equates to 6 CH505 trimers being displayed per particle. See e.g. Sliepen et al. Retrovirology 201512:82, DOI: 10.1186/s12977-015-0210-4; See also FIG. 24H-J.

[0532] Another approach to multimerize expression constructs uses staphylococcus Sortase A transpeptidase ligation to conjugate CH505 envelope trimers to cholesterol. The CH505 trimers can then be embedded into liposomes via the conjugated cholesterol. To conjugate the CH505 trimer to cholesterol either a C-terminal LPXTG tag or a N-terminal pentaglycine repeat tag was added to the CH505 envelope trimer gene. Cholesterol was also synthesized with these two tags. Sortase A was then used to covalently bond the tagged CH505 envelope to the cholesterol. The sortase A-tagged trimer protein can also be used to conjugate the trimer to other peptides, proteins, or fluorescent labels.

[0533] The invention provides design of envelopes and trimer designs wherein the envelope comprises a linker which permits addition of a lipid, such as but not limited to cholesterol, via a Sortase A reaction. See e.g. Tsukiji, S. and Nagamune, T. (2009), Sortase-Mediated Ligation: A Gift from Gram-Positive Bacteria to Protein Engineering. ChemBioChem, 10: 787-798. doi:10.1002/cbic.200800724; Proft, T. Sortase-mediated protein ligation: an emerging biotechnology tool for protein modification and immobilisation. Biotechnol Lett (2010) 32: 1. doi:10.1007/s10529-009-0116-0; Lena Schmohl, Dirk Schwarzer, Sortase-mediated ligations for the site-specific modification of proteins, Current Opinion in Chemical Biology, Volume 22, October 2014, Pages 122-128, ISSN 1367-5931, dx.doi.org/10.1016/j.cbpa.2014.09.020; Tabata et al. Anticancer Res. 2015 August; 35(8):4411-7.

[0534] The lipid modified envelopes and trimers could be formulated as liposomes. Any suitable liposome composition is contemplated.

[0535] Non-limiting embodiments of envelope designs for use in Sortase A reaction are shown in FIG. 24 B-D.

[0536] Design of Trimers with Readthrough Codons

[0537] The development of clonal cell lines that highly express trimeric HIV-1 Envelope will facilitate manufacturing of high quality proteins for clinical and research purposes. However, it is challenging to identify the cells that express trimeric protein among the many cells making various forms of HIV-1 Envelope with in the cell population. To identify cells expressing trimeric HIV-1 Envelope protein, we designed an expression construct that simultaneously produces both secreted Envelope protein as well as membrane anchored Envelope protein. The secreted Envelope protein can be purified using standard methods and results in unaltered soluble envelope. The membrane-anchored Envelope protein serves to mark the cells within a population of cells that expresses trimeric Envelope. More specifically, the trimeric Envelope expressing cells are sorted by fluorescence-activated cell sorting using a HIV-1 trimer specific antibody. The sorted cells can then be used to initiate clonal populations of cells that have been phenotypically shown to express the protein of interest.

[0538] The expression construct is designed by taking advantage of the amber stop codon UAG in messenger RNA. The codon UAG usually signifies the end of the polypeptide sequence, but at a low rate the ribosome can readthrough this stop codon and continue to elongate the polypeptide chain. We incorporated this stop codon into our protein construct followed by the natural BG505 gp41 transmembrane and cytoplasmic tail sequence ended with two stop codons. Therefore, when the stop codon is readthrough a membrane-anchored gp120/gp41 heterodimer is formed. Loughran et al. (2014) identified that the efficiency of readthrough could be increased by flanking the amber stop codon with the nucleotides CTA. Readthrough could be even further augmented with the addition of CTAG nucleotides after the amber stop codon. We engineered expression constructs with both modifications to ensure an optimal ratio of membrane-anchored and secreted trimeric Envelope protein. Since the CTAG creates a shift in reading frame we added GC nucleotides after the CTAG motif to preserve the original reading frame. The addition of CTAGGC results in the membrane anchored protein having a leucine and glycine residue expressed before the transmembrane domain. FIG. 24A shows non-limiting examples of readthrough designs. FIG. 24E and FIG. 24F show expression of “CTA” and “CTAGGC” designs in transiently transfected 293F cells. Any one of the envelopes of the invention could be designed and expressed as readthrough envelopes.

The application's sequence listing, which the Patent Office published only in electronic form, follows.

SEQUENCE LISTING (396 sequences)

SEQ ID NO: 1 - protein, 4 aa, Human immunodeficiency virus
REKR

SEQ ID NO: 2 - protein, 9 aa, Human immunodeficiency virus
RRVVEREKR

SEQ ID NO: 3 - protein, 9 aa, Artificial Sequence
  Description of Artificial Sequence: Synthetic peptide
ERVVEREKE

SEQ ID NO: 4 - protein, 4 aa, Artificial Sequence
  Description of Artificial Sequence: Synthetic peptide
SEKS

SEQ ID NO: 5 - protein, 79 aa, Human immunodeficiency virus
MRVMGIQRNYPQWWIWSMLGFWMLMICNGMWVTVYYGVPVWKEAKTTLFCASDAKAYEKEVHNVWATHACVPTDPNPQE

SEQ ID NO: 6 - protein, 33 aa, Artificial Sequence
  Description of Artificial Sequence: Synthetic polypeptide
TRPNNNTRKSIRIGPGQTFYATGDIIGNIRQAH

SEQ ID NO: 7 - protein, 24 aa, Homo sapiens
MPMGSLQPLATLYLLGMLVASVLA

SEQ ID NO: 8 - DNA, 38 bp, Artificial Sequence
  Description of Artificial Sequence: Synthetic primer
cgtggcgtctggatacaacttcaccgactactatatac

SEQ ID NO: 9 - DNA, 42 bp, Artificial Sequence
  Description of Artificial Sequence: Synthetic primer
cgtctggatacaacttcaacacctactatatacactgggtgc

SEQ ID NO: 10 - DNA, 32 bp, Artificial Sequence
  Description of Artificial Sequence: Synthetic primer
ggtcgcacagattacgcacaggcgtttgggga

SEQ ID NO: 11 - DNA, 34 bp, Artificial Sequence
  Description of Artificial Sequence: Synthetic primer
gattacgcaggggcgtttcaggacagagtgtcca

SEQ ID NO: 12 - DNA, 40 bp, Artificial Sequence
  Description of Artificial Sequence: Synthetic primer
gttagaaatgtgggaacggagggcagcttgctccactatg

SEQ ID NO: 13 - DNA, 43 bp, Artificial Sequence
  Description of Artificial Sequence: Synthetic primer
ggtcgcacagattacgcacaggcgtttcaggacagagtgtcca

SEQ ID NO: 14 - DNA, 27 bp, Artificial Sequence
  Description of Artificial Sequence: Synthetic primer
ggatcgaccctaggggtggtcgcacag

SEQ ID NO: 15 - DNA, 30 bp, Artificial Sequence
  Description of Artificial Sequence: Synthetic primer
gtggtcgcacagattactcaggggcgtttg

SEQ ID NO: 16 - DNA, 26 bp, Artificial Sequence
  Description of Artificial Sequence: Synthetic primer
ggggaagaccgatgggcccttggtgg

SEQ ID NO: 17 - DNA, 53 bp, Artificial Sequence
  Description of Artificial Sequence: Synthetic primer
ccatctcatccctgcgtgtctccgactcagaagcagtggtatcaacgcagagt

SEQ ID NO: 18 - DNA, 56 bp, Artificial Sequence
  Description of Artificial Sequence: Synthetic primer
cctatcccctgtgtgccttggcagtctcagggggaagaccgatgggcccttggtgg

SEQ ID NO: 19 - DNA, 32 bp, Artificial Sequence
  Description of Artificial Sequence: Synthetic oligonucleotide
tgatgaggtgaccgaattcgggacccggatcc

SEQ ID NO: 20 - DNA, 32 bp, Artificial Sequence
  Description of Artificial Sequence: Synthetic oligonucleotide
tgatgaggtgaccgaattcaggtcccggatcc

SEQ ID NO: 21 - DNA, 32 bp, Artificial Sequence
  Description of Artificial Sequence: Synthetic oligonucleotide
tgatgagggacccgaattcggtcaccggatcc

SEQ ID NO: 22 - DNA, 32 bp, Artificial Sequence
  Description of Artificial Sequence: Synthetic oligonucleotide
tgatgagggtcctgaattcggttaccggatcc

SEQ ID NO: 23 - DNA, 32 bp, Artificial Sequence
  Description of Artificial Sequence: Synthetic oligonucleotide
tgatgagaattcggtcaccgggtcctggatcc

SEQ ID NO: 24 - DNA, 32 bp, Artificial Sequence
  Description of Artificial Sequence: Synthetic oligonucleotide
tgatgagaattcggtgaccgggacctggatcc

SEQ ID NO: 25 - DNA, 2131 bp, Artificial Sequence
  Description of Artificial Sequence: Synthetic polynucleotide
gtcgacaagaagccaccatgcgcgtgatgggcatccagcgcaactacccgcagtggtggatctggtcgatgctgggcttctggatgctcatgatctgcaacggcatgtgggtgacggtgtactacggcgtgccggtgtggaaggaggccaagacgaccctgttctgcgcgtcggacgccaaggcctacgagaaggaggtgcacaacgtgtgggcgacccacgcctgcgtgcccacggaccccaacccgcaggagatggtgctgaagaacgtgaccgagaacttcaacatgtggaagaacgacatggtggaccagatgcacgaggacgtgatctccctgtgggaccagtccctgaagccctgcgtgaagctgaccccgctgtgcgtgaccctgaactgcaccaacgccaccgcgtccaactcctccatcatcgagggcatgaagaactgctccttcaacatcacgacggagctgcgcgacaagcgcgagaagaagaacgccctgttctacaagctggacatcgtgcagctggacggcaactcctcgcagtacaggctgatcaactgcaacacctccgtcatcacgcaggcgtgccccaaggtgtccttcgaccccatccccatccactactgcgcccccgccggctacgccatcctgaagtgcaacaacaagaccttcaccggcaccggcccgtgcaacaacgtgtccaccgtgcagtgcacgcacgggatcaagcccgtggtgtccacgcagctgctcctgaacgggtcgctggccgagggcgagatcatcatccggtccgagaacatcacgaagaacgtgaagaccatcatcgtgcacctgaacgagtccgtgaagatcgagtgcacccgcccgaacaacaagacgcgcacctccatccggatcggccctggccaggccttctacgccaccggccaggtgatcggcgacatccgcgaggcgtactgcaacatcaacgagtccaagtggaacgagaccctgcagcgcgtgtccaagaagctgaaggagtacttcccccacaagaacatcaccttccagccgtcgtccggcggcgacctcgagatcaccacgcactccttcaactgcggtggcgagttcttctactgcaacacgtcgtcgctgttcaaccgcacctacatggccaactccaccgacatggccaactccaccgagaccaactccacgcgcaccatcacgatccactgccgcatcaagcagatcatcaacatgtggcaggaggtgggccgcgccatgtacgcaccgcccatcgccggcaacatcacctgcatctccaacatcaccggcctcctgctgacccgcgacggcggcaagaacaacacggagaccttcaggccaggcggaggcaacatgaaggacaactggcgctccgagctgtacaagtacaaggtggtggaggtgaagcccctgggcgtggcacccaccaacgcccgcaggcgcgtcgtggagcgcgagaagcgcgccgtgggcatgggcgccgtgttcctgggcttcctgggcgctgcgggctccaccatgggtgccgcgtccatcaccctgaccgtgcaggcccgccagctgctctccggcatcgtgcagcagcagtccaacctcctgaaggccatcgaggcccagcagcacatgctgaagctgaccgtgtggggcatcaagcagctgcaggccagggtgctcgcgctcgagcgctacctgaaggaccagcagctgctcggcatgtggggctgctccggcaagctgatctgcaccaccaacgtgtactggaactcgtcctggtccaacaagacctacggcgacatctgggacaacatgacctggatgcagtgggagcgcgagatctccaactacaccgagatcatctacgagctcctcgaggagtcccagaaccagcaggagaagaacgagcaggatctgctcgcgctggaccgctggaactccctgtggaactggttcaacatcaccaactggctgtggtacatcaagatcttcatcatgatcgtgggcggcctgatcggcctgcgcatcatcttcgccgtgctgtcgctggtgaaccgcgtgcgccagggctgatgaggtgaccgaattcgggacccggatcc

SEQ ID NO: 26 - DNA, 2131 bp, Artificial Sequence
  Description of Artificial Sequence: Synthetic polynucleotide
gtcgacaagaagccaccatgcgcgtgatgggcatccagcgcaactacccgcagtggtggatctggtcgatgctgggcttctggatgctcatgatctgcaacggcatgtgggtgacggtgtactacggcgtgccggtgtggaaggaggccaagacgaccctgttctgcgcgtcggacgccaaggcctacgagaaggaggtgcacaacgtgtgggcgacccacgcctgcgtgcccacggaccccaacccgcaggagatggtgctgaagaacgtgaccgagaacttcaacatgtggaagaacgacatggtggaccagatgcacgaggacgtgatctccctgtgggaccagtccctgaagccctgcgtgaagctgaccccgctgtgcgtgaccctgaactgcaccaacgccaccgcgtccaactcctccatcatcgagggcatgaagaactgctccttcaacatcacgacggagctgcgcgacaagcgcgagaagaagaacgccctgttctacaagctggacatcgtgcagctggacggcaactcctcgcagtacaggctgatcaactgcaacacctccgtcatcacgcaggcgtgccccaaggtgtccttcgaccccatccccatccactactgcgcccccgccggctacgccatcctgaagtgcaacaacaagaccttcaccggcaccggcccgtgcaacaacgtgtccaccgtgcagtgcacgcacgggatcaagcccgtggtgtccacgcagctgctcctgaacgggtcgctggccgagggcgagatcatcatccggtccgagaacatcacggacaacgggaagaccatcatcgtgcacctgaacgagtccgtgaagatcgagtgcacccgcccgaacaacaagacgcgcacctccatccggatcggccctggccaggccttctacgccaccggccaggtgatcggcgacatccgcgaggcgtactgcaacatcaacgagtccaagtggaacgagaccctgcagcgcgtgtccaagaagctgaaggagtacttcccccacaagaacatcaccttccagccgtcgtccggcggcgacctcgagatcaccacgcactccttcaactgcggtggcgagttcttctactgcaacacgtcgtcgctgttcaaccgcacctacatggccaactccaccgacatggccaactccaccgagaccaactccacgcgcaccatcacgatccactgccgcatcaagcagatcatcaacatgtggcaggaggtgggccgcgccatgtacgcaccgcccatcgccggcaacatcacctgcatctccaacatcaccggcctcctgctgacccgcgacggcggcaagaacaacacggagaccttcaggccaggcggaggcaacatgaaggacaactggcgctccgagctgtacaagtacaaggtggtggaggtgaagcccctgggcgtggcacccaccaacgcccgcaggcgcgtcgtggagcgcgagaagcgcgccgtgggcatgggcgccgtgttcctgggcttcctgggcgctgcgggctccaccatgggtgccgcgtccatcaccctgaccgtgcaggcccgccagctgctctccggcatcgtgcagcagcagtccaacctcctgaaggccatcgaggcccagcagcacatgctgaagctgaccgtgtggggcatcaagcagctgcaggccagggtgctcgcgctcgagcgctacctgaaggaccagcagctgctcggcatgtggggctgctccggcaagctgatctgcaccaccaacgtgtactggaactcgtcctggtccaacaagacctacggcgacatctgggacaacatgacctggatgcagtgggagcgcgagatctccaactacaccgagatcatctacgagctcctcgaggagtcccagaaccagcaggagaagaacgagcaggatctgctcgcgctggaccgctggaactccctgtggaactggttcaacatcaccaactggctgtggtacatcaagatcttcatcatgatcgtgggcggcctgatcggcctgcgcatcatcttcgccgtgctgtcgctggtgaaccgcgtgcgccagggctgatgaggtgaccgaattcaggtcccggatcc

SEQ ID NO: 27 - DNA, 2131 bp, Artificial Sequence
  Description of Artificial Sequence: Synthetic polynucleotide
gtcgacaagaagccaccatgcgcgtgatgggcatccagcgcaactacccgcagtggtggatctggtcgatgctgggcttctggatgctcatgatctgcaacggcatgtgggtgacggtgtactacggcgtgccggtgtggaaggaggccaagacgaccctgttctgcgcgtcggacgccaaggcctacgagaaggaggtgcacaacgtgtgggcgacccacgcctgcgtgcccacggaccccaacccgcaggagatggtgctgaagaacgtgaccgagaacttcaacatgtggaagaacgacatggtggaccagatgcacgaggacgtgatctccctgtgggaccagtccctgaagccctgcgtgaagctgaccccgctgtgcgtgaccctgaactgcaccaacgccaccgcgtccaacaactccatcatcgagggcatgaagaactgctccttcaacatcacgacggagctgcgcgacaagcgcgagaagaagaacgccctgttctacaagctggacatcgtgcagctggacggcaactcctcgcagtacaggctgatcaactgcaacacctccgtcatcacgcaggcgtgccccaaggtgtccttcgaccccatccccatccactactgcgcccccgccggctacgccatcctgaagtgcaacaacaagaccttcaccggcaccggcccgtgcaacaacgtgtccaccgtgcagtgcacgcacgggatcaagcccgtggtgtccacgcagctgctcctgaacgggtcgctggccgagggcgagatcatcatccggtccgagaacatcacgaacaacgcgaagaccatcatcgtgcacctgaacgagtccgtgaagatcgagtgcacccgcccgaacaacaagacgcgcacgtccatccggatcggccctggccaggccttctacgccaccggccaggtgatcggcgacatccgcaaggcgtactgcaacatctcggagtccaagtggaacgagaccctgcagcgcgtgtccaagaagctgaaggagtacttcccccacaagaacatcaccttccagccgtcgtccggcggcgacctcgagatcaccacgcactccttcaactgcggtggcgagttcttctactgcaacacgtcgtcgctgttcaaccgcacctacatggccaactccaccgacatggccaactccaccgagaccaactccacgcgcaccatcacgctccactgccgcatcaagcagatcatcaacatgtggcaggaggtgggccgcgccatgtacgcaccgcccatcgccggcaacatcacctgcatctccaacatcaccggcctcctgctgacccgcgacggcggcaagaacaacacggagaccttcaggccaggcggaggcaacatgaaggacaactggcgctccgagctgtacaagtacaaggtggtggaggtgaagcccctgggcgtggcacccaccaacgcccgcaggcgcgtcgtggagcgcgagaagcgcgccgtgggcatgggcgccgtgttcctgggcttcctgggcgctgcgggctccaccatgggtgccgcgtccatcaccctgaccgtgcaggcccgccagctgctctccggcatcgtgcagcagcagtccaacctcctgaaggccatcgaggcccagcagcacatgctgaagctgaccgtgtggggcatcaagcagctgcaggccagggtgctcgcgctcgagcgctacctgaaggaccagcagctgctcggcatgtggggctgctccggcaagctgatctgcaccaccaacgtgtactggaactcgtcctggtccaacaagacctacggcgacatctgggacaacatgacctggatgcagtgggagcgcgagatctccaactacaccgagatcatctacgagctcctcgaggagtcccagaaccagcaggagaagaacgagcaggatctgctcgcgctggaccgctggaactccctgtggaactggttcaacatcaccaactggctgtggtacatcaagatcttcatcatgatcgtgggcggcctgatcggcctgcgcatcatcttcgccgtgctgtcgctggtgaaccgcgtgcgccagggctgatgagggacccgaattcggtcaccggatcc

SEQ ID NO: 28 - DNA, 2131 bp, Artificial Sequence
  Description of Artificial Sequence: Synthetic polynucleotide
gtcgacaagaagccaccatgcgcgtgatgggcatccagcgcaactacccgcagtggtggatctggtcgatgctgggcttctggatgctcatgatctgcaacggcatgtgggtgacggtgtactacggcgtgccggtgtggaaggaggccaagacgaccctgttctgcgcgtcggacgccaaggcctacgagaaggaggtgcacaacgtgtgggcgacccacgcctgcgtgcccacggaccccaacccgcaggagatggtgctgaagaacgtgaccgagaacttcaacatgtggaagaacgacatggtggaccagatgcacgaggacgtgatctccctgtgggaccagtccctgaagccctgcgtgaagatgaccccgctgtgcgtgaccctgaactgcaccaacgccaccgcgatcaactcctccatcatcgagggcatgaagaactgctccttcaacatcacgacggagctgcgcgacaagcgcgagaagaagaacgccctgttctacaagctggacatcgtgcagctggacggcaactcctcgcagtacaggctgatcaactgcaacacctccgtcatcacgcaggcgtgccccaaggtgtccttcgaccccatccccatccactactgcgcccccgccggctacgccatcctgaagtgcaacaacaagaccttcaccggcaccggcccgtgcaacaacgtgtccaccgtgcagtgcacgcacgggatcaagcccgtggtgtccacgcagctgctcctgaacgggtcgctggccgagggcgagatcatcatccggtccgagaacatcacgaacaacgacaagaccatcatcgtgcacctgaacgagtccgtgaagatcgagtgcacccgcccgaacaacaagacgcgcacctccatccggatcggccctggccaggccttctacgccaccggccaggtgatcggcgacatccgcgaggcgcactgcaacatctcggagtccaagtggaacgagaccctgcagcgcgtgtccaagaagctgaaggagtacttcccccacaagaacatcaccttccagccgtcgtccggcggcgacctcgagatcaccacgcactccttcaactgcggtggcgagttcttctactgcaacacgtcgtcgctgttcaaccgcacctacatggccaactccaccgacatggccaactccaccgagaccaactccacgcgcaccatcacgatccgctgccgcatcaagcagatcatcaacatgtggcaggaggtgggccgcgccatgtacgcaccgcccatcgccggcaacatcacctgcatctccaacatcaccggcctcctgctgacccgcgacggcggcaagaacaacacggagaccttcaggccaggcggaggcaacatgaaggacaactggcgctccgagctgtacaagtacaaggtggtggaggtgaagcccctgggcgtggcacccaccaacgcccgcaggcgcgtcgtggagcgcgagaagcgcgccgtgggcatgggcgccgtgttcctgggcttcctgggcgctgcgggctccaccatgggtgccgcgtccatcaccctgaccgtgcaggcccgccagctgctctccggcatcgtgcagcagcagtccaacctcctgaaggccatcgaggcccagcagcacatgctgaagctgaccgtgtggggcatcaagcagctgcaggccagggtgctcgcgctcgagcgctacctgaaggaccagcagctgctcggcatgtggggctgctccggcaagctgatctgcaccaccaacgtgtactggaactcgtcctggtccaacaagagctacggcgacatctgggacaacatgacctggatgcagtgggagcgcgagatctccaactacaccgagatcatctacgagctcctcgaggagtcccagaaccagcaggagaagaacgagcaggatctgctcgcgctggaccgctggaactccctgtggaactggttcaacatcaccaactggctgtggtacatcaagatcttcatcatgatcgtgggcggcctgatcggcctgcgcatcatcttcgccgtgctgtcgctggtgaaccgcgtgcgccagggctgatgagggtcctgaattcggttaccggatcc

SEQ ID NO: 29 - DNA, 2140 bp, Artificial Sequence
  Description of Artificial Sequence: Synthetic polynucleotide
gtcgacaagaagccaccatgcgcgtgatgggcatccagcgcaactacccgcagtggtggatctggtcgatgctgggcttctggatgctcatgatctgcaacggcatgtgggtgacggtgtactacggcgtgccggtgtggaaggaggccaagacgaccctgttctgcgcgtcggacgccaaggcctacgagaaggaggtgcacaacgtgtgggcgacccacgcctgcgtgcccacggaccccaacccgcaggagatggtgctgaagaacgtgaccgagaacttcaacatgtggaagaacgacatggtggaccagatgcacgaggacgtgatctccctgtgggaccagtccctgaagccctgcgtgaagctgaccccgctgtgcgtgaccctgagctgcacgaacgccaccaacgcgacggcgtcgaactcgtccatcctcgaggggatgaagaactgctccttcaacatcacgacggagctgcgcgacaagcgcgagaagaagaacgccctgttctacaagctggacatcgtgcagctggacggcaactcctcgcagtacaggctgatcaactgcaacacctccgtcatcacgcaggcgtgccccaaggtgtccttcgaccccatccccatccactactgcgcccccgccggctacgccatcctgaagtgcaacaacaagaccttcaacggcaccggcccgtgcaacaacgtgtccaccgtgcagtgcacgcacgggatcaagcccgtggtgtccacgcagctgctcctgaacgggtcgctggccgagggcgagatcatcatccggtcgaagaacatcacggacaacgggaagaccatcatcgtgcacctgaacgagtccgtgaagatcgagtgcacccgcccgagcaacaacacgcgcacctccatccggatcggccctggccaggccttctacgccaccggccaggtgatcggcgacatccgcgaggcgcactgcaacatctccgagtccaagtggaacgagaccctgcagcgcgtgtccgagaagctgaaggagtacttcccccacaagaacatcaccttccagccgtcgtccggcggcgacctcgagatcaccacgcactccttcaactgcggtggcgagttcttctactgcaacacgtcgtcgctgttcaaccgcacctacatggccacctccaccgacatggccaactccaccgagaccaactccacgcgcatcatcacgatccgctgccgcatcaagcagatcatcaacatgtggcaggaggtgggccgcgccatgtacgcaccgcccatcgccggcaacatcacctgcatctccaacatcaccggcctcctgctgacccgcgacggcggcaagaacgacacggacaccttcaggccagagggaggcaacatgaaggacaactggcgctccgagctgtacaagtacaaggtggtggaggtgaagcccctgggcgtggcacccaccaacgcccgcaggcgcgtcgtggagcgcgagaagcgcgccgtgggcatgggcgccgtgttcctgggcttcctgggcgctgcgggctccaccatgggtgccgcgtccatcaccctgaccgtgcaggcccgccagctgctctccggcatcgtgcagcagcagtccaacctcctgaaggccatcgaggcccagcagcacatgctgaagctgaccgtgtggggcatcaagcagctgcaggccagggtgctcgcgctcgagcgctacctgaaggaccagcagctgctcggcatgtggggctgctccggcaagctgatctgcaccaccaacgtgtactggaactcgtcctggtccaacaagacctacggcgacatctgggacaacatgacctggatgcagtgggagcgcgagatctccaactacaccgagctgatctacgagctcctcgaggagtcccagaaccagcaggagaagaacgagcaggatctgctcgcgctggaccgctggaactccctgtggaactggttcaacatcaccaactggctgtggtacatcaagatcttcatcatgatcgtgggcggcctgatcggcctgcgcatcatcttcgccgtgctgtcgctggtgaaccgcgtgcgccagggctgatgagaattcggtcaccgggtcctggatcc

SEQ ID NO: 30 - DNA, 2143 bp, Artificial Sequence
  Description of Artificial Sequence: Synthetic polynucleotide
gtcgacaagaagccaccatgcgcgtgatgggcatccagcgcaactacccgcagtggtggatctggtcgatgctgggcttctggatgctcatgatctgcaacggcatgtgggtgacggtgtactacggcgtgccggtgtggaaggaggccaagacgaccctgttctgcgcgtcggacgccaaggcctacgagaaggaggtgcacaacgtgtgggcgacccacgcctgcgtgcccacggaccccaacccgcaggagatggtgctgaagaacgtgaccgagaacttcaacatgtggaagaacgacatggtggaccagatgcacgaggacgtgatctccctgtgggaccagtccctgaagccctgcgtgaagctgaccccgctgtgcgtgaccctgaactgcaccgacgccaccgcgtccaacgcaaccgcgagcaacgccacggcgtcgaactcctccatcatcgagggcatgaagaactgctccttcaacatcacgacggagctgcgcgacaagcgcgagaagaagaacgccctgttctacaagctggacatcgtgcagctggacggcaactcctcgcagtacaggctgatcaactgcaacacctccgtcatcacgcaggcgtgccccaaggtgtccttcgaccccatccccatccactactgcgcccccgccggctacgccatcctgaagtgcaacaacaagaccttcaacggcaccggcccgtgcaacaacgtgtccaccgtgcagtgcacgcacgggatcaagcccgtggtgtccacgcagctgctcctgaacgggtcgctggccgagggcgagatcatcatccggtccgagaacatcacggacaacgggaagaccatcatcgtgcacctgaacgagtccgtgaagatcgagtgcacccgcccgtcgaacaacacgcgcacctccatccggatcggccctggccaggccttctacgccaccggccaggtgatcggcgacatccgcgaggcgcactgcaacatctcggagtccaagtggaacgagaccctgcagcgcgtgtccaagaagctgaaggagtacttcccccacaagaacatcaccttccagccgtcgtccggcggcgacctcgagatcaccacgcactccttcaactgcggtggcgagttcttctactgcaacacgtcgtcgctgttcaaccgcacctacatggccaactccaccgagaccaactccacgcgcatcatcacgatccgctgccgcatcaagcagatcatcaacatgtggcaggaggtgggccgcgccatgtacgcaccgcccatcgccggcaacatcacctgcatctccaacatcaccggcctcctgctgacccgcgacggcggcaacaacaacacggagaccttcaggccaggcggaggcaacatgaaggacaactggcgctccgagctgtacaagtacaaggtggtggaggtgaagcccctgggcgtggcacccaccaacgcccgcaggcgcgtcgtggagcgcgagaagcgcgccgtgggcatgggcgccgtgttcctgggcttcctgggcgctgcgggctccaccatgggtgccgcgtccatcaccctgaccgtgcaggcccgccagctgctctccggcatcgtgcagcagcagtccaacctcctgaaggccatcggggcccagcagcacatgctgaagctgaccgtgtggggcatcaagcagctgcaggccagggtgctcgcgctcgagcgctacctgaaggaccagcagctgctcggcatgtggggctgctccggcaagctgatctgcaccaccaacgtgtactggaactcgtcctggtccaacaagacctacggcgacatctgggacaacatgacctggatgcagtgggagcgcgagatctccaactacaccgagatgatctacgagctcctcgaggagtcccagaaccagcaggagaagaacgagcaggatctgctcgcgctggaccgctggaactccctgtggaactggttcaacatcaccaactggctgtggtacatcaagatcttcatcatgatcgtgggcggcctgatcggcctgcgcatcatcttcgccgtgctgtcgctggtgaaccgcgtgcgccagggctgatgagaattcggtgaccgggacctggatcc

SEQ ID NO: 31 - protein, 694 aa, Artificial Sequence
  Description of Artificial Sequence: Synthetic polypeptide
MRVMGIQRNYPQWWIWSMLGFWMLMICNGMWVTVYYGVPVWKEAKTTLFCASDAKAYEKEVHNVWATHACVPTDPNPQEMVLKNVTENFNMWKNDMVDQMHEDVISLWDQSLKPCVKLTPLCVTLNCTNATASNSSIIEGMKNCSFNITTELRDKREKKNALFYKLDIVQLDGNSSQYRLINCNTSVITQACPKVSFDPIPIHYCAPAGYAILKCNNKTFTGTGPCNNVSTVQCTHGIKPVVSTQLLLNGSLAEGEIIIRSENITKNVKTIIVHLNESVKIECTRPNNKTRTSIRIGPGQAFYATGQVIGDIREAYCNINESKWNETLQRVSKKLKEYFPHKNITFQPSSGGDLEITTHSFNCGGEFFYCNTSSLFNRTYMANSTDMANSTETNSTRTITIHCRIKQIINMWQEVGRAMYAPPIAGNITCISNITGLLLTRDGGKNNTETFRPGGGNMKDNWRSELYKYKVVEVKPLGVAPTNARRRVVEREKRAVGMGAVFLGFLGAAGSTMGAASITLTVQARQLLSGIVQQQSNLLKAIEAQQHMLKLTVWGIKQLQARVLALERYLKDQQLLGMWGCSGKLICTTNVYWNSSWSNKTYGDIWDNMTWMQWEREISNYTEIIYELLEESQNQQEKNEQDLLALDRWNSLWNWFNITNWLWYIKIFIMIVGGLIGLRIIFAVLSLVNRVRQG

SEQ ID NO: 32 - protein, 694 aa, Artificial Sequence
  Description of Artificial Sequence: Synthetic polypeptide
MRVMGIQRNYPQWWIWSMLGFWMLMICNGMWVTVYYGVPVWKEAKTTLFCASDAKAYEKEVHNVWATHACVPTDPNPQEMVLKNVTENFNMWKNDMVDQMHEDVISLWDQSLKPCVKLTPLCVTLNCTNATASNSSIIEGMKNCSFNITTELRDKREKKNALFYKLDIVQLDGNSSQYRLINCNTSVITQACPKVSFDPIPIHYCAPAGYAILKCNNKTFTGTGPCNNVSTVQCTHGIKPVVSTQLLLNGSLAEGEIIIRSENITDNGKTIIVHLNESVKIECTRPNNKTRTSIRIGPGQAFYATGQVIGDIREAYCNINESKWNETLQRVSKKLKEYFPHKNITFQPSSGGDLEITTHSFNCGGEFFYCNTSSLFNRTYMANSTDMANSTETNSTRTITIHCRIKQIINMWQEVGRAMYAPPIAGNITCISNITGLLLTRDGGKNNTETFRPGGGNMKDNWRSELYKYKVVEVKPLGVAPTNARRRVVEREKRAVGMGAVFLGFLGAAGSTMGAASITLTVQARQLLSGIVQQQSNLLKAIEAQQHMLKLTVWGIKQLQARVLALERYLKDQQLLGMWGCSGKLICTTNVYWNSSWSNKTYGDIWDNMTWMQWEREISNYTEIIYELLEESQNQQEKNEQDLLALDRWNSLWNWFNITNWLWYIKIFIMIVGGLIGLRIIFAVLSLVNRVRQG

SEQ ID NO: 33 - protein, 694 aa, Artificial Sequence
  Description of Artificial Sequence: Synthetic polypeptide
MRVMGIQRNYPQWWIWSMLGFWMLMICNGMWVTVYYGVPVWKEAKTTLFCASDAKAYEKEVHNVWATHACVPTDPNPQEMVLKNVTENFNMWKNDMVDQMHEDVISLWDQSLKPCVKLTPLCVTLNCTNATASNNSIIEGMKNCSFNITTELRDKREKKNALFYKLDIVQLDGNSSQYRLINCNTSVITQACPKVSFDPIPIHYCAPAGYAILKCNNKTFTGTGPCNNVSTVQCTHGIKPVVSTQLLLNGSLAEGEIIIRSENITNNAKTIIVHLNESVKIECTRPNNKTRTSIRIGPGQAFYATGQVIGDIRKAYCNISESKWNETLQRVSKKLKEYFPHKNITFQPSSGGDLEITTHSFNCGGEFFYCNTSSLFNRTYMANSTDMANSTETNSTRTITLHCRIKQIINMWQEVGRAMYAPPIAGNITCISNITGLLLTRDGGKNNTETFRPGGGNMKDNWRSELYKYKVVEVKPLGVAPTNARRRVVEREKRAVGMGAVFLGFLGAAGSTMGAASITLTVQARQLLSGIVQQQSNLLKAIEAQQHMLKLTVWGIKQLQARVLALERYLKDQQLLGMWGCSGKLICTTNVYWNSSWSNKTYGDIWDNMTWMQWEREISNYTEIIYELLEESQNQQEKNEQDLLALDRWNSLWNWFNITNWLWYIKIFIMIVGGLIGLRIIFAVLSLVNRVRQG

SEQ ID NO: 34 - protein, 694 aa, Artificial Sequence
  Description of Artificial Sequence: Synthetic polypeptide
MRVMGIQRNYPQWWIWSMLGFWMLMICNGMWVTVYYGVPVWKEAKTTLFCASDAKAYEKEVHNVWATHACVPTDPNPQEMVLKNVTENFNMWKNDMVDQMHEDVISLWDQSLKPCVKMTPLCVTLNCTNATAINSSIIEGMKNCSFNITTELRDKREKKNALFYKLDIVQLDGNSSQYRLINCNTSVITQACPKVSFDPIPIHYCAPAGYAILKCNNKTFTGTGPCNNVSTVQCTHGIKPVVSTQLLLNGSLAEGEIIIRSENITNNDKTIIVHLNESVKIECTRPNNKTRTSIRIGPGQAFYATGQVIGDIREAHCNISESKWNETLQRVSKKLKEYFPHKNITFQPSSGGDLEITTHSFNCGGEFFYCNTSSLFNRTYMANSTDMANSTETNSTRTITIRCRIKQIINMWQEVGRAMYAPPIAGNITCISNITGLLLTRDGGKNNTETFRPGGGNMKDNWRSELYKYKVVEVKPLGVAPTNARRRVVEREKRAVGMGAVFLGFLGAAGSTMGAASITLTVQARQLLSGIVQQQSNLLKAIEAQQHMLKLTVWGIKQLQARVLALERYLKDQQLLGMWGCSGKLICTTNVYWNSSWSNKSYGDIWDNMTWMQWEREISNYTEIIYELLEESQNQQEKNEQDLLALDRWNSLWNWFNITNWLWYIKIFIMIVGGLIGLRIIFAVLSLVNRVRQG

SEQ ID NO: 35 - protein, 698 aa, Artificial Sequence
  Description of Artificial Sequence: Synthetic polypeptide
MRVMGIQRNYPQWWIWSMLGFWMLMICNGMWVTVYYGVPVWKEAKTTLFCASDAKAYEKEVHNVWATHACVPTDPNPQEMVLKNVTENFNMWKNDMVDQMHEDVISLWDQSLKPCVKLTPLCVTLNCTDATASNATASNATASNSSIIEGMKNCSFNITTELRDKREKKNALFYKLDIVQLDGNSSQYRLINCNTSVITQACPKVSFDPIPIHYCAPAGYAILKCNNKTFNGTGPCNNVSTVQCTHGIKPVVSTQLLLNGSLAEGEIIIRSENITDNGKTIIVHLNESVKIECTRPSNNTRTSIRIGPGQAFYATGQVIGDIREAHCNISESKWNETLQRVSKKLKEYFPHKNITFQPSSGGDLEITTHSFNCGGEFFYCNTSSLFNRTYMANSTETNSTRIITIRCRIKQIINMWQEVGRAMYAPPIAGNITCISNITGLLLTRDGGNNNTETFRPGGGNMKDNWRSELYKYKVVEVKPLGVAPTNARRRVVEREKRAVGMGAVFLGFLGAAGSTMGAASITLTVQARQLLSGIVQQQSNLLKAIGAQQHMLKLTVWGIKQLQARVLALERYLKDQQLLGMWGCSGKLICTTNVYWNSSWSNKTYGDIWDNMTWMQWEREISNYTEMIYELLEESQNQQEKNEQDLLALDRWNSLWNWFNITNWLWYIKIFIMIVGGLIGLRIIFAVLSLVNRVRQG

SEQ ID NO: 36 - protein, 697 aa, Artificial Sequence
  Description of Artificial Sequence: Synthetic polypeptide
MRVMGIQRNYPQWWIWSMLGFWMLMICNGMWVTVYYGVPVWKEAKTTLFCASDAKAYEKEVHNVWATHACVPTDPNPQEMVLKNVTENFNMWKNDMVDQMHEDVISLWDQSLKPCVKLTPLCVTLSCTNATNATASNSSILEGMKNCSFNITTELRDKREKKNALFYKLDIVQLDGNSSQYRLINCNTSVITQACPKVSFDPIPIHYCAPAGYAILKCNNKTFNGTGPCNNVSTVQCTHGIKPVVSTQLLLNGSLAEGEIIIRSKNITDNGKTIIVHLNESVKIECTRPSNNTRTSIRIGPGQAFYATGQVIGDIREAHCNISESKWNETLQRVSEKLKEYFPHKNITFQPSSGGDLEITTHSFNCGGEFFYCNTSSLFNRTYMATSTDMANSTETNSTRIITIRCRIKQIINMWQEVGRAMYAPPIAGNITCISNITGLLLTRDGGKNDTDTFRPEGGNMKDNWRSELYKYKVVEVKPLGVAPTNARRRVVEREKRAVGMGAVFLGFLGAAGSTMGAASITLTVQARQLLSGIVQQQSNLLKAIEAQQHMLKLTVWGIKQLQARVLALERYLKDQQLLGMWGCSGKLICTTNVYWNSSWSNKTYGDIWDNMTWMQWEREISNYTELIYELLEESQNQQEKNEQDLLALDRWNSLWNWFNITNWLWYIKIFIMIVGGLIGLRIIFAVLSLVNRVRQG

SEQ ID NO: 37 - protein, 698 aa, Artificial Sequence; identical to SEQ ID NO: 35
  Description of Artificial Sequence: Synthetic polypeptide

SEQ ID NO: 38 - DNA, 32 bp, Artificial Sequence
  Description of Artificial Sequence: Synthetic oligonucleotide
tagtaaggtgaccgaattcgggacccggatcc

SEQ ID NO: 39 - DNA, 32 bp, Artificial Sequence
  Description of Artificial Sequence: Synthetic oligonucleotide
tagtaaggtgaccgaattcaggtcccggatcc

SEQ ID NO: 40 - DNA, 32 bp, Artificial Sequence
  Description of Artificial Sequence: Synthetic oligonucleotide
tagtaagggacccgaattcggtcaccggatcc

SEQ ID NO: 41 - DNA, 32 bp, Artificial Sequence
  Description of Artificial Sequence: Synthetic oligonucleotide
tagtaagggtcctgaattcggttaccggatcc

SEQ ID NO: 42 - DNA, 32 bp, Artificial Sequence
  Description of Artificial Sequence: Synthetic oligonucleotide
tagtaagaattcggtcaccgggtcctggatcc

SEQ ID NO: 43 - DNA, 32 bp, Artificial Sequence
  Description of Artificial Sequence: Synthetic oligonucleotide
tagtaagaattcggtgaccgggacctggatcc

SEQ ID NO: 44 - DNA, 1507 bp, Artificial Sequence
  Description of Artificial Sequence: Synthetic polynucleotide
gtcgacaagaagccaccatgcgcgtgatgggcatccagcgcaactacccgcagtggtggatctggtcgatgctgggcttctggatgctcatgatctgcaacggcgtgccggtgtggaaggaggccaagacgaccctgttctgcgcgtcggacgccaaggcctacgagaaggaggtgcacaacgtgtgggcgacccacgcctgcgtgcccacggaccccaacccgcaggagatggtgctgaagaacgtgaccgagaacttcaacatgtggaagaacgacatggtggaccagatgcacgaggacgtgatctccctgtgggaccagtccctgaagccctgcgtgaagctgaccccgctgtgcgtgaccctgaactgcaccaacgccaccgcgtccaactcctccatcatcgagggcatgaagaactgctccttcaacatcacgacggagctgcgcgacaagcgcgagaagaagaacgccctgttctacaagctggacatcgtgcagctggacggcaactcctcgcagtacaggctgatcaactgcaacacctccgtcatcacgcaggcgtgccccaaggtgtccttcgaccccatccccatccactactgcgcccccgccggctacgccatcctgaagtgcaacaacaagaccttcaccggcaccggcccgtgcaacaacgtgtccaccgtgcagtgcacgcacgggatcaagcccgtggtgtccacgcagctgctcctgaacgggtcgctggccgagggcgagatcatcatccggtccgagaacatcacgaagaacgtgaagaccatcatcgtgcacctgaacgagtccgtgaagatcgagtgcacccgcccgaacaacaagacgcgcacctccatccggatcggccctggccaggccttctacgccaccggccaggtgatcggcgacatccgcgaggcgtactgcaacatcaacgagtccaagtggaacgagaccctgcagcgcgtgtccaagaagctgaaggagtacttcccccacaagaacatcaccttccagccgtcgtccggcggcgacctcgagatcaccacgcactccttcaactgcggtggcgagttcttctactgcaacacgtcgtcgctgttcaaccgcacctacatggccaactccaccgacatggccaactccaccgagaccaactccacgcgcaccatcacgatccactgccgcatcaagcagatcatcaacatgtggcaggaggtgggccgcgccatgtacgcaccgcccatcgccggcaacatcacctgcatctccaacatcaccggcctcctgctgacccgcgacggcggcaagaacaacacggagaccttcaggccaggcggaggcaacatgaaggacaactggcgctccgagctgtacaagtacaaggtggtggaggtgaagcccctgggcgtggcacccaccaacgcccgcgagcgcgtcgtggagcgcgagaaggagtagtaaggtgaccgaattcgggacccggatcc

SEQ ID NO: 45 - DNA, 1507 bp, Artificial Sequence
  Description of Artificial Sequence: Synthetic polynucleotide
gtcgacaagaagccaccatgcgcgtgatgggcatccagcgcaactacccgcagtggtggatctggtcgatgctgggcttctggatgctcatgatctgcaacggcgtgccggtgtggaaggaggccaagacgaccctgttctgcgcgtcggacgccaaggcctacgagaaggaggtgcacaacgtgtgggcgacccacgcctgcgtgcccacggaccccaacccgcaggagatggtgctgaagaacgtgaccgagaacttcaacatgtggaagaacgacatggtggaccagatgcacgaggacgtgatctccctgtgggaccagtccctgaagccctgcgtgaagctgaccccgctgtgcgtgaccctgaactgcaccaacgccaccgcgtccaactcctccatcatcgagggcatgaagaactgctccttcaacatcacgacggagctgcgcgacaagcgcgagaagaagaacgccctgttctacaagctggacatcgtgcagctggacggcaactcctcgcagtacaggctgatcaactgcaacacctccgtcatcacgcaggcgtgccccaaggtgtccttcgaccccatccccatccactactgcgcccccgccggctacgccatcctgaagtgcaacaacaagaccttcaccggcaccggcccgtgcaacaacgtgtccaccgtgcagtgcacgcacgggatcaagcccgtggtgtccacgcagctgctcctgaacgggtcgctggccgagggcgagatcatcatccggtccgagaacatcacggacaacgggaagaccatcatcgtgcacctgaacgagtccgtgaagatcgagtgcacccgcccgaacaacaagacgcgcacctccatccggatcggccctggccaggccttctacgccaccggccaggtgatcggcgacatccgcgaggcgtactgcaacatcaacgagtccaagtggaacgagaccctgcagcgcgtgtccaagaagctgaaggagtacttcccccacaagaacatcaccttccagccgtcgtccggcggcgacctcgagatcaccacgcactccttcaactgcggtggcgagttcttctactgcaacacgtcgtcgctgttcaaccgcacctacatggccaactccaccgacatggccaactccaccgagaccaactccacgcgcaccatcacgatccactgccgcatcaagcagatcatcaacatgtggcaggaggtgggccgcgccatgtacgcaccgcccatcgccggcaacatcacctgcatctccaacatcaccggcctcctgctgacccgcgacggcggcaagaacaacacggagaccttcaggccaggcggaggcaacatgaaggacaactggcgctccgagctgtacaagtacaaggtggtggaggtgaagcccctgggcgtggcacccaccaacgcccgcgagcgcgtcgtggagcgcgagaaggagtagtaaggtgaccgaattcaggtcccggatcc

SEQ ID NO: 46 - DNA, 1507 bp, Artificial Sequence
  Description of Artificial Sequence: Synthetic polynucleotide
gtcgacaagaagccaccatgcgcgtgatgggcatccagcgcaactacccgcagtggtggatctggtcgatgctgggcttctggatgctcatgatctgcaacggcgtgccggtgtggaaggaggccaagacgaccctgttctgcgcgtcggacgccaaggcctacgagaaggaggtgcacaacgtgtgggcgacccacgcctgcgtgcccacggaccccaacccgcaggagatggtgctgaagaacgtgaccgagaacttcaacatgtggaagaacgacatggtggaccagatgcacgaggacgtgatctccctgtgggaccagtccctgaagccctgcgtgaagctgaccccgctgtgcgtgaccctgaactgcaccaacgccaccgcgtccaacaactccatcatcgagggcatgaagaactgctccttcaacatcacgacggagctgcgcgacaagcgcgagaagaagaacgccctgttctacaagctggacatcgtgcagctggacggcaactcctcgcagtacaggctgatcaactgcaacacctccgtcatcacgcaggcgtgccccaaggtgtccttcgaccccatccccatccactactgcgcccccgccggctacgccatcctgaagtgcaacaacaagaccttcaccggcaccggcccgtgcaacaacgtgtccaccgtgcagtgcacgcacgggatcaagcccgtggtgtccacgcagctgctcctgaacgggtcgctggccgagggcgagatcatcatccggtccgagaacatcacgaacaacgcgaagaccatcatcgtgcacctgaacgagtccgtgaagatcgagtgcacccgcccgaacaacaagacgcgcacgtccatccggatcggccctggccaggccttctacgccaccggccaggtgatcggcgacatccgcaaggcgtactgcaacatctcggagtccaagtggaacgagaccctgcagcgcgtgtccaagaagctgaaggagtacttcccccacaagaacatcaccttccagccgtcgtccggcggcgacctcgagatcaccacgcactccttcaactgcggtggcgagttcttctactgcaacacgtcgtcgctgttcaaccgcacctacatggccaactccaccgacatggccaactccaccgagaccaactccacgcgcaccatcacgctccactgccgcatcaagcagatcatcaacatgtggcaggaggtgggccgcgccatgtacgcaccgcccatcgccggcaacatcacctgcatctccaacatcaccggcctcctgctgacccgcgacggcggcaagaacaacacggagaccttcaggccaggcggaggcaacatgaaggacaactggcgctccgagctgtacaagtacaaggtggtggaggtgaagcccctgggcgtggcacccaccaacgcccgcgagcgcgtcgtggagcgcgagaaggagtagtaagggacccgaattcggtcaccggatcc

SEQ ID NO: 47 - DNA, 1507 bp, Artificial Sequence
  Description of Artificial Sequence: Synthetic polynucleotide
gtcgacaagaagccaccatgcgcgtgatgggcatccagcgcaactacccgcagtggtggatctggtcgatgctgggcttctggatgctcatgatctgcaacggcgtgccggtgtggaaggaggccaagacgaccctgttctgcgcgtcggacgccaaggcctacgagaaggaggtgcacaacgtgtgggcgacccacgcctgcgtgcccacggaccccaacccgcaggagatggtgctgaagaacgtgaccgagaacttcaacatgtggaagaacgacatggtggaccagatgcacgaggacgtgatctccctgtgggaccagtccctgaagccctgcgtgaagatgaccccgctgtgcgtgaccctgaactgcaccaacgccaccgcgatcaactcctccatcatcgagggcatgaagaactgctccttcaacatcacgacggagctgcgcgacaagcgcgagaagaagaacgccctgttctacaagctggacatcgtgcagctggacggcaactcctcgcagtacaggctgatcaactgcaacacctccgtcatcacgcaggcgtgccccaaggtgtccttcgaccccatccccatccactactgcgcccccgccggctacgccatcctgaagtgcaacaacaagaccttcaccggcaccggcccgtgcaacaacgtgtccaccgtgcagtgcacgcacgggatcaagcccgtggtgtccacgcagctgctcctgaacgggtcgctggccgagggcgagatcatcatccggtccgagaacatcacgaacaacgacaagaccatcatcgtgcacctgaacgagtccgtgaagatcgagtgcacccgcccgaacaacaagacgcgcacctccatccggatcggccctggccaggccttctacgccaccggccaggtgatcggcgacatccgcgaggcgcactgcaacatctcggagtccaagtggaacgagaccctgcagcgcgtgtccaagaagctgaaggagtacttcccccacaagaacatcaccttccagccgtcgtccggcggcgacctcgagatcaccacgcactccttcaactgcggtggcgagttcttctactgcaacacgtcgtcgctgttcaaccgcacctacatggccaactccaccgacatggccaactccaccgagaccaactccacgcgcaccatcacgatccgctgccgcatcaagcagatcatcaacatgtggcaggaggtgggccgcgccatgtacgcaccgcccatcgccggcaacatcacctgcatctccaacatcaccggcctcctgctgacccgcgacggcggcaagaacaacacggagaccttcaggccaggcggaggcaacatgaaggacaactggcgctccgagctgtacaagtacaaggtggtggaggtgaagcccctgggcgtggcacccaccaacgcccgcgagcgcgtcgtggagcgcgagaaggagtagtaagggtcctgaattcggttaccggatcc

SEQ ID NO: 48 - DNA, 1516 bp, Artificial Sequence
  Description of Artificial Sequence: Synthetic polynucleotide
gtcgacaagaagccaccatgcgcgtgatgggcatccagcgcaactacccgcagtggtggatctggtcgatgctgggcttctggatgctcatgatctgcaacggcgtgccggtgtggaaggaggccaagacgaccctgttctgcgcgtcggacgccaaggcctacgagaaggaggtgcacaacgtgtgggcgacccacgcctgcgtgcccacggaccccaacccgcaggagatggtgctgaagaacgtgaccgagaacttcaacatgtggaagaacgacatggtggaccagatgcacgaggacgtgatctccctgtgggaccagtccctgaagccctgcgtgaagctgaccccgctgtgcgtgaccctgagctgcacgaacgccaccaacgcgacggcgtcgaactcgtccatcctcgaggggatgaagaactgctccttcaacatcacgacggagctgcgcgacaagcgcgagaagaagaacgccctgttctacaagctggacatcgtgcagctggacggcaactcctcgcagtacaggctgatcaactgcaacacctccgtcatcacgcaggcgtgccccaaggtgtccttcgaccccatccccatccactactgcgcccccgccggctacgccatcctgaagtgcaacaacaagaccttcaacggcaccggcccgtgcaacaacgtgtccaccgtgcagtgcacgcacgggatcaagcccgtggtgtccacgcagctgctcctgaacgggtcgctggccgagggcgagatcatcatccggtcgaagaacatcacggacaacgggaagaccatcatcgtgcacctgaacgagtccgtgaagatcgagtgcacccgcccgagcaacaacacgcgcacctccatccggatcggccctggccaggccttctacgccaccggccaggtgatcggcgacatccgcgaggcgcactgcaacatctccgagtccaagtggaacgagaccctgcagcgcgtgtccgagaagctgaaggagtacttcccccacaagaacatcaccttccagccgtcgtccggcggcgacctcgagatcaccacgcactccttcaactgcggtggcgagttcttctactgcaacacgtcgtcgctgttcaaccgcacctacatggccacctccaccgacatggccaactccaccgagaccaactccacgcgcatcatcacgatccgctgccgcatcaagcagatcatcaacatgtggcaggaggtgggccgcgccatgtacgcaccgcccatcgccggcaacatcacctgcatctccaacatcaccggcctcctgctgacccgcgacggcggcaagaacgacacggacaccttcaggccagagggaggcaacatgaaggacaactggcgctccgagctgtacaagtacaaggtggtggaggtgaagcccctgggcgtggcacccaccaacgcccgcgagcgcgtcgtggagcgcgagaaggagtagtaagaattcggtcaccgggtcctggatcc

SEQ ID NO: 49 - DNA, 1519 bp, Artificial Sequence
  Description of Artificial Sequence: Synthetic polynucleotide
gtcgacaagaagccaccatgcgcgtgatgggcatccagcgcaactacccgcagtggtggatctggtcgatgctgggcttctggatgctcatgatctgcaacggcgtgccggtgtggaaggaggccaagacgaccctgttctgcgcgtcggacgccaaggcctacgagaaggaggtgcacaacgtgtgggcgacccacgcctgcgtgcccacggaccccaacccgcaggagatggtgctgaagaacgtgaccgagaacttcaacatgtggaagaacgacatggtggaccagatgcacgaggacgtgatctccctgtgggaccagtccctgaagccctgcgtgaagctgaccccgctgtgcgtgaccctgaactgcaccgacgccaccgcgtccaacgcaaccgcgagcaacgccacggcgtcgaactcctccatcatcgagggcatgaagaactgctccttcaacatcacgacggagctgcgcgacaagcgcgagaagaagaacgccctgttctacaagctggacatcgtgcagctggacggcaactcctcgcagtacaggctgatcaactgcaacacctccgtcatcacgcaggcgtgccccaaggtgtccttcgaccccatccccatccactactgcgcccccgccggctacgccatcctgaagtgcaacaacaagaccttcaacggcaccggcccgtgcaacaacgtgtccaccgtgcagtgcacgcacgggatcaagcccgtggtgtccacgcagctgctcctgaacgggtcgctggccgagggcgagatcatcatccggtccgagaacatcacggacaacgggaagaccatcatcgtgcacctgaacgagtccgtgaagatcgagtgcacccgcccgtcgaacaacacgcgcacctccatccggatcggccctggccaggccttctacgccaccggccaggtgatcggcgacatccgcgaggcgcactgcaacatctcggagtccaagtggaacgagaccctgcagcgcgtgtccaagaagctgaaggagtacttcccccacaagaacatcaccttccagccgtcgtccggcggcgacctcgagatcaccacgcactccttcaactgcggtggcgagttcttctactgcaacacgtcgtcgctgttcaaccgcacctacatggccaactccaccgagaccaactccacgcgcatcatcacgatccgctgccgcatcaagcagatcatcaacatgtggcaggaggtgggccgcgccatgtacgcaccgcccatcgccggcaacatcacctgcatctccaacatcaccggcctcctgctgacccgcgacggcggcaacaacaacacggagaccttcaggccaggcggaggcaacatgaaggacaactggcgctccgagctgtacaagtacaaggtggtggaggtgaagcccctgggcgtggcacccaccaacgcccgcgagcgcgtcgtggagcgcgagaaggagtagtaagaattcggtgaccgggacctggatcc

SEQ ID NO: 50 - protein, 486 aa, Artificial Sequence
  Description of Artificial Sequence: Synthetic polypeptide
MRVMGIQRNYPQWWIWSMLGFWMLMICNGVPVWKEAKTTLFCASDAKAYEKEVHNVWATHACVPTDPNPQEMVLKNVTENFNMWKNDMVDQMHEDVISLWDQSLKPCVKLTPLCVTLNCTNATASNSSIIEGMKNCSFNITTELRDKREKKNALFYKLDIVQLDGNSSQYRLINCNTSVITQACPKVSFDPIPIHYCAPAGYAILKCNNKTFTGTGPCNNVSTVQCTHGIKPVVSTQLLLNGSLAEGEIIIRSENITKNVKTIIVHLNESVKIECTRPNNKTRTSIRIGPGQAFYATGQVIGDIREAYCNINESKWNETLQRVSKKLKEYFPHKNITFQPSSGGDLEITTHSFNCGGEFFYCNTSSLFNRTYMANSTDMANSTETNSTRTITIHCRIKQIINMWQEVGRAMYAPPIAGNITCISNITGLLLTRDGGKNNTETFRPGGGNMKDNWRSELYKYKVVEVKPLGVAPTNARERVVEREKE

SEQ ID NO: 51 - protein, 486 aa, Artificial Sequence
  Description of Artificial Sequence: Synthetic polypeptide
MRVMGIQRNYPQWWIWSMLGFWMLMICNGVPVWKEAKTTLFCASDAKAYEKEVHNVWATHACVPTDPNPQEMVLKNVTENFNMWKNDMVDQMHEDVISLWDQSLKPCVKLTPLCVTLNCTNATASNSSIIEGMKNCSFNITTELRDKREKKNALFYKLDIVQLDGNSSQYRLINCNTSVITQACPKVSFDPIPIHYCAPAGYAILKCNNKTFTGTGPCNNVSTVQCTHGIKPVVSTQLLLNGSLAEGEIIIRSENITDNGKTIIVHLNESVKIECTRPNNKTRTSIRIGPGQAFYATGQVIGDIREAYCNINESKWNETLQRVSKKLKEYFPHKNITFQPSSGGDLEITTHSFNCGGEFFYCNTSSLFNRTYMANSTDMANSTETNSTRTITIHCRIKQIINMWQEVGRAMYAPPIAGNITCISNITGLLLTRDGGKNNTETFRPGGGNMKDNWRSELYKYKVVEVKPLGVAPTNARERVVEREKE

SEQ ID NO: 52 - protein, 486 aa, Artificial Sequence
  Description of Artificial Sequence: Synthetic polypeptide
MRVMGIQRNYPQWWIWSMLGFWMLMICNGVPVWKEAKTTLFCASDAKAYEKEVHNVWATHACVPTDPNPQEMVLKNVTENFNMWKNDMVDQMHEDVISLWDQSLKPCVKLTPLCVTLNCTNATASNNSIIEGMKNCSFNITTELRDKREKKNALFYKLDIVQLDGNSSQYRLINCNTSVITQACPKVSFDPIPIHYCAPAGYAILKCNNKTFTGTGPCNNVSTVQCTHGIKPVVSTQLLLNGSLAEGEIIIRSENITNNAKTIIVHLNESVKIECTRPNNKTRTSIRIGPGQAFYATGQVIGDIRKAYCNISESKWNETLQRVSKKLKEYFPHKNITFQPSSGGDLEITTHSFNCGGEFFYCNTSSLFNRTYMANSTDMANSTETNSTRTITLHCRIKQIINMWQEVGRAMYAPPIAGNITCISNITGLLLTRDGGKNNTETFRPGGGNMKDNWRSELYKYKVVEVKPLGVAPTNARERVVEREKE

SEQ ID NO: 53 - protein, 486 aa, Artificial Sequence
  Description of Artificial Sequence: Synthetic polypeptide
MRVMGIQRNYPQWWIWSMLGFWMLMICNGVPVWKEAKTTLFCASDAKAYEKEVHNVWATHACVPTDPNPQEMVLKNVTENFNMWKNDMVDQMHEDVISLWDQSLKPCVKMTPLCVTLNCTNATAINSSIIEGMKNCSFNITTELRDKREKKNALFYKLDIVQLDGNSSQYRLINCNTSVITQACPKVSFDPIPIHYCAPAGYAILKCNNKTFTGTGPCNNVSTVQCTHGIKPVVSTQLLLNGSLAEGEIIIRSENITNNDKTIIVHLNESVKIECTRPNNKTRTSIRIGPGQAFYATGQVIGDIREAHCNISESKWNETLQRVSKKLKEYFPHKNITFQPSSGGDLEITTHSFNCGGEFFYCNTSSLFNRTYMANSTDMANSTETNSTRTITIRCRIKQIINMWQEVGRAMYAPPIAGNITCISNITGLLLTRDGGKNNTETFRPGGGNMKDNWRSELYKYKVVEVKPLGVAPTNARERVVEREKE

SEQ ID NO: 54 - protein, 489 aa, Artificial Sequence
  Description of Artificial Sequence: Synthetic polypeptide
MRVMGIQRNYPQWWIWSMLGFWMLMICNGVPVWKEAKTTLFCASDAKAYEKEVHNVWATHACVPTDPNPQEMVLKNVTENFNMWKNDMVDQMHEDVISLWDQSLKPCVKLTPLCVTLSCTNATNATASNSSILEGMKNCSFNITTELRDKREKKNALFYKLDIVQLDGNSSQYRLINCNTSVITQACPKVSFDPIPIHYCAPAGYAILKCNNKTFNGTGPCNNVSTVQCTHGIKPVVSTQLLLNGSLAEGEIIIRSKNITDNGKTIIVHLNESVKIECTRPSNNTRTSIRIGPGQAFYATGQVIGDIREAHCNISESKWNETLQRVSEKLKEYFPHKNITFQPSSGGDLEITTHSFNCGGEFFYCNTSSLFNRTYMATSTDMANSTETNSTRIITIRCRIKQIINMWQEVGRAMYAPPIAGNITCISNITGLLLTRDGGKNDTDTFRPEGGNMKDNWRSELYKYKVVEVKPLGVAPTNARERVVEREKE

SEQ ID NO: 55 - protein, 490 aa, Artificial Sequence
  Description of Artificial Sequence: Synthetic polypeptide
MRVMGIQRNYPQWWIWSMLGFWMLMICNGVPVWKEAKTTLFCASDAKAYEKEVHNVWATHACVPTDPNPQEMVLKNVTENFNMWKNDMVDQMHEDVISLWDQSLKPCVKLTPLCVTLNCTDATASNATASNATASNSSIIEGMKNCSFNITTELRDKREKKNALFYKLDIVQLDGNSSQYRLINCNTSVITQACPKVSFDPIPIHYCAPAGYAILKCNNKTFNGTGPCNNVSTVQCTHGIKPVVSTQLLLNGSLAEGEIIIRSENITDNGKTIIVHLNESVKIECTRPSNNTRTSIRIGPGQAFYATGQVIGDIREAHCNISESKWNETLQRVSKKLKEYFPHKNITFQPSSGGDLEITTHSFNCGGEFFYCNTSSLFNRTYMANSTETNSTRIITIRCRIKQIINMWQEVGRAMYAPPIAGNITCISNITGLLLTRDGGNNNTETFRPGGGNMKDNWRSELYKYKVVEVKPLGVAPTNARERVVEREKE

SEQ ID NO: 56 - DNA, 2581 bp, Artificial Sequence
  Description of Artificial Sequence: Synthetic polynucleotide
gtcgacaagaaatgcgcgtgatgggcatccagcgcaactacccgcagtggtggatctggtcgatgctgggcttctggatgctcatgatctgcaacggcatgtgggtgacggtgtactacggcgtgccggtgtggaaggaggccaagacgaccctgttctgcgcgtcggacgccaaggcctacgagaaggaggtgcacaacgtgtgggcgacccacgcctgcgtgcccacggaccccaacccgcaggagatggtgctgaagaacgtgaccgagaacttcaacatgtggaagaacgacatggtggaccagatgcacgaggacgtgatctccctgtgggaccagtccctgaagccctgcgtgaagctgaccccgctgtgcgtgaccctgaactgcaccaacgccaccgcgtccaactcctccatcatcgagggcatgaagaactgctccttcaacatcacgacggagctgcgcgacaagcgcgagaagaagaacgccctgttctacaagctggacatcgtgcagctggacggcaactcctcgcagtacaggctgatcaactgcaacacctccgtcatcacgcaggcgtgccccaaggtgtccttcgaccccatccccatccactactgcgcccccgccggctacgccatcctgaagtgcaacaacaagaccttcaccggcaccggcccgtgcaacaacgtgtccaccgtgcagtgcacgcacgggatcaagcccgtggtgtccacgcagctgctcctgaacgggtcgctggccgagggcgagatcatcatccggtccgagaacatcacgaagaacgtgaagaccatcatcgtgcacctgaacgagtccgtgaagatcgagtgcacccgcccgaacaacaagacgcgcacctccatccggatcggccctggccaggccttctacgccaccggccaggtgatcggcgacatccgcgaggcgtactgcaacatcaacgagtccaagtggaacgagaccctgcagcgcgtgtccaagaagctgaaggagtacttcccccacaagaacatcaccttccagccgtcgtccggcggcgacctcgagatcaccacgcactccttcaactgcggtggcgagttcttctactgcaacacgtcgtcgctgttcaaccgcacctacatggccaactccaccgacatggccaactccaccgagaccaactccacgcgcaccatcacgatccactgccgcatcaagcagatcatcaacatgtggcaggaggtgggccgcgccatgtacgcaccgcccatcgccggcaacatcacctgcatctccaacatcaccggcctcctgctgacccgcgacggcggcaagaacaacacggagaccttcaggccaggcggaggcaacatgaaggacaactggcgctccgagctgtacaagtacaaggtggtggaggtgaagcccctgggcgtggcacccaccaacgcccgcaggcgcgtcgtggagcgcgagaagcgcgccgtgggcatgggcgccgtgttcctgggcttcctgggcgctgcgggctccaccatgggtgccgcgtccatcaccctgaccgtgcaggcccgccagctgctctccggcatcgtgcagcagcagtccaacctcctgaaggccatcgaggcccagcagcacatgctgaagctgaccgtgtggggcatcaagcagctgcaggccagggtgctcgcgctcgagcgctacctgaaggaccagcagctgctcggcatgtggggctgctccggcaagctgatctgcaccaccaacgtgtactggaactcgtcctggtccaacaagacctacggcgacatctgggacaacatgacctggatgcagtgggagcgcgagatctccaactacaccgagatcatctacgagctcctcgaggagtcccagaaccagcaggagaagaacgagcaggatctgctcgcgctggaccgctggaactccctgtggaactggttcaacatcaccaactggctgtggtacatcaagatcttcatcatgatcgtgggcggcctgatcggcctgcgcatcatcttcgccgtgctgtcgctggtgaaccgcgtgcgccagggctactccccgctgtccctgcaaacgctgatcccctccccccggggcccggacaggcccggtggcatcgaggaggagggcggcgagcaggaccgcaaccgctccacgcgcctggtgtccggcttcctggccctggtgtgggacgacctgcgctccctgtgcctgttcatctaccaccgcctgcgcgacttcatcctgatcgcggcccgcgctggcgagctgctgggccggtcctcgctgaagggcctgcgccgcggctgggaggccctgaagtacctgggctcgctggtgcagtactggggcctggagctgaagcgctccgccatctccctgctggacaccctggccatcgccgtgggcgagggcaccgaccgcatcctggagttcgtgctgggcatctgccgcgccatccgcaacatccccacccgcatccgccagggcttcgagaccgccctcctgtagtaaggtgaccgaattcgggacccggatcc

SEQ ID NO: 57 - DNA, 2581 bp, Artificial Sequence
  Description of Artificial Sequence: Synthetic polynucleotide
gtcgacaagaaatgcgcgtgatgggcatccagcgcaactacccgcagtggtggatctggtcgatgctgggcttctggatgctcatgatctgcaacggcatgtgggtgacggtgtactacggcgtgccggtgtggaaggaggccaagacgaccctgttctgcgcgtcggacgccaaggcctacgagaaggaggtgcacaacgtgtgggcgacccacgcctgcgtgcccacggaccccaacccgcaggagatggtgctgaagaacgtgaccgagaacttcaacatgtggaagaacgacatggtggaccagatgcacgaggacgtgatctccctgtgggaccagtccctgaagccctgcgtgaagctgaccccgctgtgcgtgaccctgaactgcaccaacgccaccgcgtccaactcctccatcatcgagggcatgaagaactgctccttcaacatcacgacggagctgcgcgacaagcgcgagaagaagaacgccctgttctacaagctggacatcgtgcagctggacggcaactcctcgcagtacaggctgatcaactgcaacacctccgtcatcacgcaggcgtgccccaaggtgtccttcgaccccatccccatccactactgcgcccccgccggctacgccatcctgaagtgcaacaacaagaccttcaccggcaccggcccgtgcaacaacgtgtccaccgtgcagtgcacgcacgggatcaagcccgtggtgtccacgcagctgctcctgaacgggtcgctggccgagggcgagatcatcatccggtccgagaacatcacggacaacgggaagaccatcatcgtgcacctgaacgagtccgtgaagatcgagtgcacccgcccgaacaacaagacgcgcacctccatccggatcggccctggccaggccttctacgccaccggccaggtgatcggcgacatccgcgaggcgtactgcaacatcaacgagtccaagtggaacgagaccctgcagcgcgtgtccaagaagctgaaggagtacttcccccacaagaacatcaccttccagccgtcgtccggcggcgacctcgagatcaccacgcactccttcaactgcggtggcgagttcttctactgcaacacgtcgtcgctgttcaaccgcacctacatggccaactccaccgacatggccaactccaccgagaccaactccacgcgcaccatcacgatccactgccgcatcaagcagatcatcaacatgtggcaggaggtgggccgcgccatgtacgcaccgcccatcgccggcaacatcacctgcatctccaacatcaccggcctcctgctgacccgcgacggcggcaagaacaacacggagaccttcaggccaggcggaggcaacatgaaggacaactggcgctccgagctgtacaagtacaaggtggtggaggtgaagcccctgggcgtggcacccaccaacgcccgcaggcgcgtcgtggagcgcgagaagcgcgccgtgggcatgggcgccgtgttcctgggcttcctgggcgctgcgggctccaccatgggtgccgcgtccatcaccctgaccgtgcaggcccgccagctgctctccggcatcgtgcagcagcagtccaacctcctgaaggccatcgaggcccagcagcacatgctgaagctgaccgtgtggggcatcaagcagctgcaggccagggtgctcgcgctcgagcgctacctgaaggaccagcagctgctcggcatgtggggctgctccggcaagctgatctgcaccaccaacgtgtactggaactcgtcctggtccaacaagacctacggcgacatctgggacaacatgacctggatgcagtgggagcgcgagatctccaactacaccgagatcatctacgagctcctcgaggagtcccagaaccagcaggagaagaacgagcaggatctgctcgcgctggaccgctggaactccctgtggaactggttcaacatcaccaactggctgtggtacatcaagatcttcatcatgatcgtgggcggcctgatcggcctgcgcatcatcttcgccgtgctgtcgctggtgaaccgcgtgcgccagggctactccccgctgtccctgcaaacgctgatcccctccccccggggcccggacaggcccggtggcatcgaggaggagggcggcgagcaggaccgcaaccgctccacgcgcctggtgtccggcttcctggccctggtgtgggacgacctgcgctccctgtgcctgttcatctaccaccgcctgcgcgacttcatcctgatcgcggcccgcgctggcgagctgctgggccggtcctcgctgaagggcctgcgccgcggctgggaggccctgaagtacctgggctcgctggtgcagtactggggcctggagctgaagcgctccgccatctccctgctggacaccctggccatcgccgtgggcgagggcaccgaccgcatcctggagttcgtgctgggcatctgccgcgccatccgcaacatccccacccgcatccgccagggcttcgagaccgccctcctgtagtaaggtgaccgaattcaggtcccggatcc

SEQ ID NO: 58 - DNA, 2581 bp, Artificial Sequence
  Description of Artificial Sequence: Synthetic polynucleotide
gtcgacaagaaatgcgcgtgatgggcatccagcgcaactacccgcagtggtggatctggtcgatgctgggcttctggatgctcatgatctgcaacggcatgtgggtgacggtgtactacggcgtgccggtgtggaaggaggccaagacgaccctgttctgcgcgtcggacgccaaggcctacgagaaggaggtgcacaacgtgtgggcgacccacgcctgcgtgcccacggaccccaacccgcaggagatggtgctgaagaacgtgaccgagaacttcaacatgtggaagaacgacatggtggaccagatgcacgaggacgtgatctccctgtgggaccagtccctgaagccctgcgtgaagctgaccccgctgtgcgtgaccctgaactgcaccaacgccaccgcgtccaacaactccatcatcgagggcatgaagaactgctccttcaacatcacgacggagctgcgcgacaagcgcgagaagaagaacgccctgttctacaagctggacatcgtgcagctggacggcaactcctcgcagtacaggctgatcaactgcaacacctccgtcatcacgcaggcgtgccccaaggtgtccttcgaccccatccccatccactactgcgcccccgccggctacgccatcctgaagtgcaacaacaagaccttcaccggcaccggcccgtgcaacaacgtgtccaccgtgcagtgcacgcacgggatcaagcccgtggtgtccacgcagctgctcctgaacgggtcgctggccgagggcgagatcatcatccggtccgagaacatcacgaacaacgcgaagaccatcatcgtgcacctgaacgagtccgtgaagatcgagtgcacccgcccgaacaacaagacgcgcacgtccatccggatcggccctggccaggccttctacgccaccggccaggtgatcggcgacatccgcaaggcgtactgcaacatctcggagtccaagtggaacgagaccctgcagcgcgtgtccaagaagctgaaggagtacttcccccacaagaacatcaccttccagccgtcgtccggcggcgacctcgagatcaccacgcactccttcaactgcggtggcgagttcttctactgcaacacgtcgtcgctgttcaaccgcacctacatggccaactccaccgacatggccaactccaccgagaccaactccacgcgcaccatcacgctccactgccgcatcaagcagatcatcaacatgtggcaggaggtgggccgcgccatgtacgcaccgcccatcgccggcaacatcacctgcatctccaacatcaccggcctcctgctgacccgcgacggcggcaagaacaacacggagaccttcaggccaggcggaggcaacatgaaggacaactggcgctccgagctgtacaagtacaaggtggtggaggtgaagcccctgggcgtggcacccaccaacgcccgcaggcgcgtcgtggagcgcgagaagcgcgccgtgggcatgggcgccgtgttcctgggcttcctgggcgctgcgggctccaccatgggtgccgcgtccatcaccctgaccgtgcaggcccgccagctgctctccggcatcgtgcagcagcagtccaacctcctgaaggccatcgaggcccagcagcacatgctgaagctgaccgtgtggggcatcaagcagctgcaggccagggtgctcgcgctcgagcgctacctgaaggaccagcagctgctcggcatgtggggctgctccggcaagctgatctgcaccaccaacgtgtactggaactcgtcctggtccaacaagacctacggcgacatctgggacaacatgacctggatgcagtgggagcgcgagatctccaactacaccgagatcatctacgagctcctcgaggagtcccagaaccagcaggagaagaacgagcaggatctgctcgcgctggaccgctggaactccctgtggaactggttcaacatcaccaactggctgtggtacatcaagatcttcatcatgatcgtgggcggcctgatcggcctgcgcatcatcttcgccgtgctgtcgctggtgaaccgcgtgcgccagggctactccccgctgtccctgcaaacgctgatcccctccccccggggcccggacaggcccggtggcatcgaggaggagggcggcgagcaggaccgcaaccgctccacgcgcctggtgtccggcttcctggccctggtgtgggacgacctgcgctccctgtgcctgttcatctaccaccgcctgcgcgacttcatcctgatcgcggcccgcgctggcgagctgctgggccggtcctcgctgaagggcctgcgccgcggctgggaggccctgaagtacctgggctcgctggtgcagtactggggcctggagctgaagcgctccgccatctccctgctggacaccctggccatcgccgtgggcgagggcaccgaccgcatcctggagttcgtgctgggcatctgccgcgccatccgcaacatccccacccgcatccgccagggcttcgagaccgccctcctgtagtaagggacccgaattcggtcaccggatcc

SEQ ID NO: 59 - DNA, 2581 bp, Artificial Sequence
  Description of Artificial Sequence: Synthetic polynucleotide
gtcgacaagaaatgcgcgtgatgggcatccagcgcaactacccgcagtggtggatctggtcgatgctgggcttctggatgctcatgatctgcaacggcatgtgggtgacggtgtactacggcgtgccggtgtggaaggaggccaagacgaccctgttctgcgcgtcggacgccaaggcctacgagaaggaggtgcacaacgtgtgggcgacccacgcctgcgtgcccacggaccccaacccgcaggagatggtgctgaagaacgtgaccgagaacttcaacatgtggaagaacgacatggtggaccagatgcacgaggacgtgatctccctgtgggaccagtccctgaagccctgcgtgaagatgaccccgctgtgcgtgaccctgaactgcaccaacgccaccgcgatcaactcctccatcatcgagggcatgaagaactgctccttcaacatcacgacggagctgcgcgacaagcgcgagaagaagaacgccctgttctacaagctggacatcgtgcagctggacggcaactcctcgcagtacaggctgatcaactgcaacacctccgtcatcacgcaggcgtgccccaaggtgtccttcgaccccatccccatccactactgcgcccccgccggctacgccatcctgaagtgcaacaacaagaccttcaccggcaccggcccgtgcaacaacgtgtccaccgtgcagtgcacgcacgggatcaagcccgtggtgtccacgcagctgctcctgaacgggtcgctggccgagggcgagatcatcatccggtccgagaacatcacgaacaacgacaagaccatcatcgtgcacctgaacgagtccgtgaagatcgagtgcacccgcccgaacaacaagacgcgcacctccatccggatcggccctggccaggccttctacgccaccggccaggtgatcggcgacatccgcgaggcgcactgcaacatctcggagtccaagtggaacgagaccctgcagcgcgtgtccaagaagctgaaggagtacttcccccacaagaacatcaccttccagccgtcgtccggcggcgacctcgagatcaccacgcactccttcaactgcggtggcgagttcttctactgcaacacgtcgtcgctgttcaaccgcacctacatggccaactccaccgacatggccaactccaccgagaccaactccacgcgcaccatcacgatccgctgccgcatcaagcagatcatcaacatgtggcaggaggtgggccgcgccatgtacgcaccgcccatcgccggcaacatcacctgcatctccaacatcaccggcctcctgctgacccgcgacggcggcaagaacaacacggagaccttcaggccaggcggaggcaacatgaaggacaactggcgctccgagctgtacaagtacaaggtggtggaggtgaagcccctgggcgtggcacccaccaacgcccgcaggcgcgtcgtggagcgcgagaagcgcgccgtgggcatgggcgccgtgttcctgggcttcctgggcgctgcgggctccaccatgggtgccgcgtccatcaccctgaccgtgcaggcccgccagctgctctccggcatcgtgcagcagcagtccaacctcctgaaggccatcgaggcccagcagcacatgctgaagctgaccgtgtggggcatcaagcagctgcaggccagggtgctcgcgctcgagcgctacctgaaggaccagcagctgctcggcatgtggggctgctccggcaagctgatctgcaccaccaacgtgtactggaactcgtcctggtccaacaagagctacggcgacatctgggacaacatgacctggatgcagtgggagcgcgagatctccaactacaccgagatcatctacgagctcctcgaggagtcccagaaccagcaggagaagaacgagcaggatctgctcgcgctggaccgctggaactccctgtggaactggttcaacatcaccaactggctgtggtacatcaagatcttcatcatgatcgtgggcggcctgatcggcctgcgcatcatcttcgccgtgctgtcgctggtgaaccgcgtgcgccagggctactccccgctgtccctgcaaacgctgatcccctccccccggggcccggacaggcccggtggcatcgaggaggagggcggcgagcaggaccgcaaccgctccacgcgcctggtgtccggcttcctggccctggtgtgggacgacctgcgctccctgtgcctgttcatctaccaccgcctgcgcgacttcatcctgatcgcggcccgcgctggcgagctgctgggccggtcctcgctgaagggcctgcgccgcggctgggaggccctgaagtacctgggctcgctggtgcagtactggggcctggagctgaagcgctccgccatctccctgctggacaccctggccatcgccgtgggcgagggcaccgaccgcatcctggagttcgtgctgggcatctgccgcgccatccgcaacatccccacccgcatccgccagggcttcgagaccgccctcctgtagtaagggtcctgaattcggttaccggatcc

SEQ ID NO: 60 - DNA, 2590 bp, Artificial Sequence
  Description of Artificial Sequence: Synthetic polynucleotide
gtcgacaagaaatgcgcgtgatgggcatccagcgcaactacccgcagtggtggatctggtcgatgctgggcttctggatgctcatgatctgcaacggcatgtgggtgacggtgtactacggcgtgccggtgtggaaggaggccaagacgaccctgttctgcgcgtcggacgccaaggcctacgagaaggaggtgcacaacgtgtgggcgacccacgcctgcgtgcccacggaccccaacccgcaggagatggtgctgaagaacgtgaccgagaacttcaacatgtggaagaacgacatggtggaccagatgcacgaggacgtgatctccctgtgggaccagtccctgaagccctgcgtgaagctgaccccgctgtgcgtgaccctgagctgcacgaacgccaccaacgcgacggcgtcgaactcgtccatcctcgaggggatgaagaactgctccttcaacatcacgacggagctgcgcgacaagcgcgagaagaagaacgccctgttctacaagctggacatcgtgcagctggacggcaactcctcgcagtacaggctgatcaactgcaacacctccgtcatcacgcaggcgtgccccaaggtgtccttcgaccccatccccatccactactgcgcccccgccggctacgccatcctgaagtgcaacaacaagaccttcaacggcaccggcccgtgcaacaacgtgtccaccgtgcagtgcacgcacgggatcaagcccgtggtgtccacgcagctgctcctgaacgggtcgctggccgagggcgagatcatcatccggtcgaagaacatcacggacaacgggaagaccatcatcgtgcacctgaacgagtccgtgaagatcgagtgcacccgcccgagcaacaacacgcgcacctccatccggatcggccctggccaggccttctacgccaccggccaggtgatcggcgacatccgcgaggcgcactgcaacatctccgagtccaagtggaacgagaccctgcagcgcgtgtccgagaagctgaaggagtacttcccccacaagaacatcaccttccagccgtcgtccggcggcgacctcgagatcaccacgcactccttcaactgcggtggcgagttcttctactgcaacacgtcgtcgctgttcaaccgcacctacatggccacctccaccgacatggccaactccaccgagaccaactccacgcgcatcatcacgatccgctgccgcatcaagcagatcatcaacatgtggcaggaggtgggccgcgccatgtacgcaccgcccatcgccggcaacatcacctgcatctccaacatcaccggcctcctgctgacccgcgacggcggcaagaacgacacggacaccttcaggccagagggaggcaacatgaaggacaactggcgctccgagctgtacaagtacaaggtggtggaggtgaagcccctgggcgtggcacccaccaacgcccgcaggcgcgtcgtggagcgcgagaagcgcgccgtgggcatgggcgccgtgttcctgggcttcctgggcgctgcgggctccaccatgggtgccgcgtccatcaccctgaccgtgcaggcccgccagctgctctccggcatcgtgcagcagcagtccaacctcctgaaggccatcgaggcccagcagcacatgctgaagctgaccgtgtggggcatcaagcagctgcaggccagggtgctcgcgctcgagcgctacctgaaggaccagcagctgctcggcatgtggggctgctccggcaagctgatctgcaccaccaacgtgtactggaactcgtcctggtccaacaagacctacggcgacatctgggacaacatgacctggatgcagtgggagcgcgagatctccaactacaccgagctgatctacgagctcctcgaggagtcccagaaccagcaggagaagaacgagcaggatctgctcgcgctggaccgctggaactccctgtggaactggttcaacatcaccaactggctgtggtacatcaagatcttcatcatgatcgtgggcggcctgatcggcctgcgcatcatcttcgccgtgctgtcgctggtgaaccgcgtgcgccagggctactccccgctgtccctgcaaacgctgatcccctccccccggggcccggacaggcccggtggcatcgaggaggagggcggcgagcaggaccgcaaccgctccacgcgcctggtgtccggcttcctggccctggcgtgggacgacctgcgctccctgtgcctgttcatctaccaccgcctgcgcgacttcatcctgatcgcggcccgcgctggcgagctgctgggccggtcctcgctgaagggcctgcgccgcggctgggaggccctgaagtacctgggcaacctggtgcagtactggggcctggagctgaagcgctccgccatctccctgctggacaccctggccatcgccgtgggcgagggcaccgaccgcatcctggagttcgtgctgggcatctgccgcgccatccgcaacatccccacccgcatccgccagggcttcgagaccgccctcctgtagtaagaattcggtcaccgggtcctggatcc

SEQ ID NO: 61 - DNA, 2593 bp, Artificial Sequence
  Description of Artificial Sequence: Synthetic polynucleotide
gtcgacaagaaatgcgcgtgatgggcatccagcgcaactacccgcagtggtggatctggtcgatgctgggcttctggatgctcatgatctgcaacggcatgtgggtgacggtgtactacggcgtgccggtgtggaaggaggccaagacgaccctgttctgcgcgtcggacgccaaggcctacgagaaggaggtgcacaacgtgtgggcgacccacgcctgcgtgcccacggaccccaacccgcaggagatggtgctgaagaacgtgaccgagaacttcaacatgtggaagaacgacatggtggaccagatgcacgaggacgtgatctccctgtgggaccagtccctgaagccctgcgtgaagctgaccccgctgtgcgtgaccctgaactgcaccgacgccaccgcgtccaacgcaaccgcgagcaacgccacggcgtcgaactcctccatcatcgagggcatgaagaactgctccttcaacatcacgacggagctgcgcgacaagcgcgagaagaagaacgccctgttctacaagctggacatcgtgcagctggacggcaactcctcgcagtacaggctgatcaactgcaacacctccgtcatcacgcaggcgtgccccaaggtgtccttcgaccccatccccatccactactgcgcccccgccggctacgccatcctgaagtgcaacaacaagaccttcaacggcaccggcccgtgcaacaacgtgtccaccgtgcagtgcacgcacgggatcaagcccgtggtgtccacgcagctgctcctgaacgggtcgctggccgagggcgagatcatcatccggtccgagaacatcacggacaacgggaagaccatcatcgtgcacctgaacgagtccgtgaagatcgagtgcacccgcccgtcgaacaacacgcgcacctccatccggatcggccctggccaggccttctacgccaccggccaggtgatcggcgacatccgcgaggcgcactgcaacatctcggagtccaagtggaacgagaccctgcagcgcgtgtccaagaagctgaaggagtacttcccccacaagaacatcaccttccagccgtcgtccggcggcgacctcgagatcaccacgcactccttcaactgcggtggcgagttcttctactgcaacacgtcgtcgctgttcaaccgcacctacatggccaactccaccgagaccaactccacgcgcatcatcacgatccgctgccgcatcaagcagatcatcaacatgtggcaggaggtgggccgcgccatgtacgcaccgcccatcgccggcaacatcacctgcatctccaacatcaccggcctcctgctgacccgcgacggcggcaacaacaacacggagaccttcaggccaggcggaggcaacatgaaggacaactggcgctccgagctgtacaagtacaaggtggtggaggtgaagcccctgggcgtggcacccaccaacgcccgcaggcgcgtcgtggagcgcgagaagcgcgccgtgggcatgggcgccgtgttcctgggcttcctgggcgctgcgggctccaccatgggtgccgcgtccatcaccctgaccgtgcaggcccgccagctgctctccggcatcgtgcagcagcagtccaacctcctgaaggccatcggggcccagcagcacatgctgaagctgaccgtgtggggcatcaagcagctgcaggccagggtgctcgcgctcgagcgctacctgaaggaccagcagctgctcggcatgtggggctgctccggcaagctgatctgcaccaccaacgtgtactggaactcgtcctggtccaacaagacctacggcgacatctgggacaacatgacctggatgcagtgggagcgcgagatctccaactacaccgagatgatctacgagctcctcgaggagtcccagaaccagcaggagaagaacgagcaggatctgctcgcgctggaccgctggaactccctgtggaactggttcaacatcaccaactggctgtggtacatcaagatcttcatcatgatcgtgggcggcctgatcggcctgcgcatcatcttcgccgtgctgtcgctggtgaaccgcgtgcgccagggctactccccgctgtccctgcaaacgctgatcccctccccccggggcccggacaggcccggtggcatcgaggaggagggcggcgagcaggaccgcaagcgctccacgcgcctggtgtccggcttcctggccctggtgtgggacgacctgcgctccctgtgcctgttcatctaccaccgcctgcgcgacttcatcctgatcgcggcccgcgctggcgagctgctgggccggtcctcgctgaagggcctgcgccgcggctgggaggccctgaagtacctgggctcgctggtgcagtactggggcctggagctgaagcgctccgccatctccctgctggacaccctggccatcgccgtgggcgagggcaccgaccgcatcctggagttcgcgctgggcatctgccgcgccatccgcaacatccccacccgcatccgccagggcttcgagaccgccctcctgtagtaagaattcggtgaccgggacctggatcc

SEQ ID NO: 62 - protein, 846 aa, Artificial Sequence
  Description of Artificial Sequence: Synthetic polypeptide
MRVMGIQRNYPQWWIWSMLGFWMLMICNGMWVTVYYGVPVWKEAKTTLFCASDAKAYEKEVHNVWATHACVPTDPNPQEMVLKNVTENFNMWKNDMVDQMHEDVISLWDQSLKPCVKLTPLCVTLNCTNATASNSSIIEGMKNCSFNITTELRDKREKKNALFYKLDIVQLDGNSSQYRLINCNTSVITQACPKVSFDPIPIHYCAPAGYAILKCNNKTFTGTGPCNNVSTVQCTHGIKPVVSTQLLLNGSLAEGEIIIRSENITKNVKTIIVHLNESVKIECTRPNNKTRTSIRIGPGQAFYATGQVIGDIREAYCNINESKWNETLQRVSKKLKEYFPHKNITFQPSSGGDLEITTHSFNCGGEFFYCNTSSLFNRTYMANSTDMANSTETNSTRTITIHCRIKQIINMWQEVGRAMYAPPIAGNITCISNITGLLLTRDGGKNNTETFRPGGGNMKDNWRSELYKYKVVEVKPLGVAPTNARRRVVEREKRAVGMGAVFLGFLGAAGSTMGAASITLTVQARQLLSGIVQQQSNLLKAIEAQQHMLKLTVWGIKQLQARVLALERYLKDQQLLGMWGCSGKLICTTNVYWNSSWSNKTYGDIWDNMTWMQWEREISNYTEIIYELLEESQNQQEKNEQDLLALDRWNSLWNWFNITNWLWYIKIFIMIVGGLIGLRIIFAVLSLVNRVRQGYSPLSLQTLIPSPRGPDRPGGIEEEGGEQDRNRSTRLVSGFLALVWDDLRSLCLFIYHRLRDFILIAARAGELLGRSSLKGLRRGWEALKYLGSLVQYWGLELKRSAISLLDTLAIAVGEGTDRILEFVLGICRAIRNIPTRIRQGFETALL

SEQ ID NO: 63 - protein, 846 aa, Artificial Sequence
  Description of Artificial Sequence: Synthetic polypeptide
MRVMGIQRNYPQWWIWSMLGFWMLMICNGMWVTVYYGVPVWKEAKTTLFCASDAKAYEKEVHNVWATHACVPTDPNPQEMVLKNVTENFNMWKNDMVDQMHEDVISLWDQSLKPCVKLTPLCVTLNCTNATASNSSIIEGMKNCSFNITTELRDKREKKNALFYKLDIVQLDGNSSQYRLINCNTSVITQACPKVSFDPIPIHYCAPAGYAILKCNNKTFTGTGPCNNVSTVQCTHGIKPVVSTQLLLNGSLAEGEIIIRSENITDNGKTIIVHLNESVKIECTRPNNKTRTSIRIGPGQAFYATGQVIGDIREAYCNINESKWNETLQRVSKKLKEYFPHKNITFQPSSGGDLEITTHSFNCGGEFFYCNTSSLFNRTYMANSTDMANSTETNSTRTITIHCRIKQIINMWQEVGRAMYAPPIAGNITCISNITGLLLTRDGGKNNTETFRPGGGNMKDNWRSELYKYKVVEVKPLGVAPTNARRRVVEREKRAVGMGAVFLGFLGAAGSTMGAASITLTVQARQLLSGIVQQQSNLLKAIEAQQHMLKLTVWGIKQLQARVLALERYLKDQQLLGMWGCSGKLICTTNVYWNSSWSNKTYGDIWDNMTWMQWEREISNYTEIIYELLEESQNQQEKNEQDLLALDRWNSLWNWFNITNWLWYIKIFIMIVGGLIGLRIIFAVLSLVNRVRQGYSPLSLQTLIPSPRGPDRPGGIEEEGGEQDRNRSTRLVSGFLALVWDDLRSLCLFIYHRLRDFILIAARAGELLGRSSLKGLRRGWEALKYLGSLVQYWGLELKRSAISLLDTLAIAVGEGTDRILEFVLGICRAIRNIPTRIRQGFETALL

SEQ ID NO: 64 - protein, 846 aa, Artificial Sequence
  Description of Artificial Sequence: Synthetic polypeptide
MRVMGIQRNYPQWWIWSMLGFWMLMICNGMWVTVYYGVPVWKEAKTTLFCASDAKAYEKEVHNVWATHACVPTDPNPQEMVLKNVTENFNMWKNDMVDQMHEDVISLWDQSLKPCVKLTPLCVTLNCTNATASNNSIIEGMKNCSFNITTELRDKREKKNALFYKLDIVQLDGNSSQYRLINCNTSVITQACPKVSFDPIPIHYCAPAGYAILKCNNKTFTGTGPCNNVSTVQCTHGIKPVVSTQLLLNGSLAEGEIIIRSENITNNAKTIIVHLNESVKIECTRPNNKTRTSIRIGPGQAFYATGQVIGDIRKAYCNISESKWNETLQRVSKKLKEYFPHKNITFQPSSGGDLEITTHSFNCGGEFFYCNTSSLFNRTYMANSTDMANSTETNSTRTITLHCRIKQIINMWQEVGRAMYAPPIAGNITCISNITGLLLTRDGGKNNTETFRPGGGNMKDNWRSELYKYKVVEVKPLGVAPTNARRRVVEREKRAVGMGAVFLGFLGAAGSTMGAASITLTVQARQLLSGIVQQQSNLLKAIEAQQHMLKLTVWGIKQLQARVLALERYLKDQQLLGMWGCSGKLICTTNVYWNSSWSNKTYGDIWDNMTWMQWEREISNYTEIIYELLEESQNQQEKNEQDLLALDRWNSLWNWFNITNWLWYIKIFIMIVGGLIGLRIIFAVLSLVNRVRQGYSPLSLQTLIPSPRGPDRPGGIEEEGGEQDRNRSTRLVSGFLALVWDDLRSLCLFIYHRLRDFILIAARAGELLGRSSLKGLRRGWEALKYLGSLVQYWGLELKRSAISLLDTLAIAVGEGTDRILEFVLGICRAIRNIPTRIRQGFETALL

SEQ ID NO: 65 - protein, 846 aa, Artificial Sequence
  Description of Artificial Sequence: Synthetic polypeptide
MRVMGIQRNYPQWWIWSMLGFWMLMICNGMWVTVYYGVPVWKEAKTTLFCASDAKAYEKEVHNVWATHACVPTDPNPQEMVLKNVTENFNMWKNDMVDQMHEDVISLWDQSLKPCVKMTPLCVTLNCTNATAINSSIIEGMKNCSFNITTELRDKREKKNALFYKLDIVQLDGNSSQYRLINCNTSVITQACPKVSFDPIPIHYCAPAGYAILKCNNKTFTGTGPCNNVSTVQCTHGIKPVVSTQLLLNGSLAEGEIIIRSENITNNDKTIIVHLNESVKIECTRPNNKTRTSIRIGPGQAFYATGQVIGDIREAHCNISESKWNETLQRVSKKLKEYFPHKNITFQPSSGGDLEITTHSFNCGGEFFYCNTSSLFNRTYMANSTDMANSTETNSTRTITIRCRIKQIINMWQEVGRAMYAPPIAGNITCISNITGLLLTRDGGKNNTETFRPGGGNMKDNWRSELYKYKVVEVKPLGVAPTNARRRVVEREKRAVGMGAVFLGFLGAAGSTMGAASITLTVQARQLLSGIVQQQSNLLKAIEAQQHMLKLTVWGIKQLQARVLALERYLKDQQLLGMWGCSGKLICTTNVYWNSSWSNKSYGDIWDNMTWMQWEREISNYTEIIYELLEESQNQQEKNEQDLLALDRWNSLWNWFNITNWLWYIKIFIMIVGGLIGLRIIFAVLSLVNRVRQGYSPLSLQTLIPSPRGPDRPGGIEEEGGEQDRNRSTRLVSGFLALVWDDLRSLCLFIYHRLRDFILIAARAGELLGRSSLKGLRRGWEALKYLGSLVQYWGLELKRSAISLLDTLAIAVGEGTDRILEFVLGICRAIRNIPTRIRQGFETALL

SEQ ID NO: 66 - protein, 849 aa, Artificial Sequence
  Description of Artificial Sequence: Synthetic polypeptide
MRVMGIQRNYPQWWIWSMLGFWMLMICNGMWVTVYYGVPVWKEAKTTLFCASDAKAYEKEVHNVWATHACVPTDPNPQEMVLKNVTENFNMWKNDMVDQMHEDVISLWDQSLKPCVKLTPLCVTLSCTNATNATASNSSILEGMKNCSFNITTELRDKREKKNALFYKLDIVQLDGNSSQYRLINCNTSVITQACPKVSFDPIPIHYCAPAGYAILKCNNKTFNGTGPCNNVSTVQCTHGIKPVVSTQLLLNGSLAEGEIIIRSKNITDNGKTIIVHLNESVKIECTRPSNNTRTSIRIGPGQAFYATGQVIGDIREAHCNISESKWNETLQRVSEKLKEYFPHKNITFQPSSGGDLEITTHSFNCGGEFFYCNTSSLFNRTYMATSTDMANSTETNSTRIITIRCRIKQIINMWQEVGRAMYAPPIAGNITCISNITGLLLTRDGGKNDTDTFRPEGGNMKDNWRSELYKYKVVEVKPLGVAPTNARRRVVEREKRAVGMGAVFLGFLGAAGSTMGAASITLTVQARQLLSGIVQQQSNLLKAIEAQQHMLKLTVWGIKQLQARVLALERYLKDQQLLGMWGCSGKLICTTNVYWNSSWSNKTYGDIWDNMTWMQWEREISNYTELIYELLEESQNQQEKNEQDLLALDRWNSLWNWFNITNWLWYIKIFIMIVGGLIGLRIIFAVLSLVNRVRQGYSPLSLQTLIPSPRGPDRPGGIEEEGGEQDRNRSTRLVSGFLALAWDDLRSLCLFIYHRLRDFILIAARAGELLGRSSLKGLRRGWEALKYLGNLVQYWGLELKRSAISLLDTLAIAVGEGTDRILEFVLGICRAIRNIPTRIRQGFETALL

SEQ ID NO: 67 - protein, 850 aa, Artificial Sequence
  Description of Artificial Sequence: Synthetic polypeptide
MRVMGIQRNYPQWWIWSMLGFWMLMICNGMWVTVYYGVPVWKEAKTTLFCASDAKAYEKEVHNVWATHACVPTDPNPQEMVLKNVTENFNMWKNDMVDQMHEDVISLWDQSLKPCVKLTPLCVTLNCTDATASNATASNATASNSSIIEGMKNCSFNITTELRDKREKKNALFYKLDIVQLDGNSSQYRLINCNTSVITQACPKVSFDPIPIHYCAPAGYAILKCNNKTFNGTGPCNNVSTVQCTHGIKPVVSTQLLLNGSLAEGEIIIRSENITDNGKTIIVHLNESVKIECTRPSNNTRTSIRIGPGQAFYATGQVIGDIREAHCNISESKWNETLQRVSKKLKEYFPHKNITFQPSSGGDLEITTHSFNCGGEFFYCNTSSLFNRTYMANSTETNSTRIITIRCRIKQIINMWQEVGRAMYAPPIAGNITCISNITGLLLTRDGGNNNTETFRPGGGNMKDNWRSELYKYKVVEVKPLGVAPTNARRRVVEREKRAVGMGAVFLGFLGAAGSTMGAASITLTVQARQLLSGIVQQQSNLLKAIGAQQHMLKLTVWGIKQLQARVLALERYLKDQQLLGMWGCSGKLICTTNVYWNSSWSNKTYGDIWDNMTWMQWEREISNYTEMIYELLEESQNQQEKNEQDLLALDRWNSLWNWFNITNWLWYIKIFIMIVGGLIGLRIIFAVLSLVNRVRQGYSPLSLQTLIPSPRGPDRPGGIEEEGGEQDRKRSTRLVSGFLALVWDDLRSLCLFIYHRLRDFILIAARAGELLGRSSLKGLRRGWEALKYLGSLVQYWGLELKRSAISLLDTLAIAVGEGTDRILEFALGICRAIRNIPTRIRQGFETALL

SEQ ID NO: 68 - DNA, 32 bp, Artificial Sequence; identical to SEQ ID NO: 19
  Description of Artificial Sequence: Synthetic oligonucleotide

SEQ ID NO: 69 - DNA, 32 bp, Artificial Sequence; identical to SEQ ID NO: 20
  Description of Artificial Sequence: Synthetic oligonucleotide

SEQ ID NO: 70 - DNA, 32 bp, Artificial Sequence; identical to SEQ ID NO: 21
  Description of Artificial Sequence: Synthetic oligonucleotide

SEQ ID NO: 71 - DNA, 32 bp, Artificial Sequence; identical to SEQ ID NO: 22
  Description of Artificial Sequence: Synthetic oligonucleotide

SEQ ID NO: 72 - DNA, 32 bp, Artificial Sequence; identical to SEQ ID NO: 23
  Description of Artificial Sequence: Synthetic oligonucleotide

SEQ ID NO: 73 - DNA, 32 bp, Artificial Sequence
  Description of Artificial Sequence: Synthetic oligonucleotide
tgatgagaattcggtgaccgggtcccggatcc

SEQ ID NO: 74 - DNA, 32 bp, Artificial Sequence
  Description of Artificial Sequence: Synthetic oligonucleotide
tgatgagggtcccgaattcggttaccggatcc

SEQ ID NO: 75 - DNA, 32 bp, Artificial Sequence
  Description of Artificial Sequence: Synthetic oligonucleotide
tgatgagaattcggtaaccaggtcccggatcc

SEQ ID NO: 76 - DNA, 32 bp, Artificial Sequence
  Description of Artificial Sequence: Synthetic oligonucleotide
tgatgaggtaaccgggacccgaattcggatcc

SEQ ID NO: 77 - DNA, 32 bp, Artificial Sequence; identical to SEQ ID NO: 24
  Description of Artificial Sequence: Synthetic oligonucleotide

SEQ ID NO: 78 - DNA, 2131 bp, Artificial Sequence; identical to SEQ ID NO: 25
  Description of Artificial Sequence: Synthetic polynucleotide

SEQ ID NO: 79 - DNA, 2131 bp, Artificial Sequence; identical to SEQ ID NO: 26
  Description of Artificial Sequence: Synthetic polynucleotide

SEQ ID NO: 80 - DNA, 2131 bp, Artificial Sequence; identical to SEQ ID NO: 27
  Description of Artificial Sequence: Synthetic polynucleotide

SEQ ID NO: 81 - DNA, 2131 bp, Artificial Sequence; identical to SEQ ID NO: 28
  Description of Artificial Sequence: Synthetic polynucleotide

SEQ ID NO: 82 - DNA, 2140 bp, Artificial Sequence; identical to SEQ ID NO: 29
  Description of Artificial Sequence: Synthetic polynucleotide

SEQ ID NO: 83 - DNA, 2186 bp, Artificial Sequence
  Description of Artificial Sequence: Synthetic polynucleotide
gtcgacaagaagccaccatgcgcgtgatgggcatccagcgcaactacccgcagtggtggatctggtcgatgctgggcttctggatgctcatgatctgcaacggcatgtgggtgacggtgtactacggcgtgccggtgtggaaggaggccaagacgaccctgttctgcgcgtcggacgccaaggcctacgagaaggaggtgcacaacgtgtgggcgacccacgcctgcgtgcccacggaccccaacccgcaggagatggtgctgaagaacgtgaccgagaacttcaacatgtggaagaacgacatggtggaccagatgcacgaggacgtgatctccctgtgggaccagtccctgaagccctgcgtgaagctgaccccgctgtgcgtgaccctgaactgcaccaacgcgaacgccaccgcgtccaactcctctatcatcgaggggatgaactcctccatcatcgagggcatgaagaactgctccttcaacatcacgacggagctgcgcgacaagcgcgagaagaagaacgccctgttctacaagctggacatcgtgcagctggacggcaactcctcgcagtacaggctgatcaactgcaacacctccgtcatcacgcaggcgtgccccaaggtgtccttcgaccccatccccatccactactgcgcccccgccggctacgccatcctgaagtgcaacaacaagaccttcaacggcaccggcccgtgcaacaacgtgtccaccgtgcagtgcacgcacgggatcaagcccgtggtgtccacgcagctgctcctgaacgggtcgctggccgagggcgagatcatcatccggtccgagaacatcacggacaacgggaagaccatcatcgtgcacctgaacgagtccgtgaagatcgagtgcacccgcccgagcaacaacacgcgcacctccatccggatcggccctggccaggccttctacgccaccggccaggtgatcggcgacatccgcgaggcgcactgcaacatctcggagtccaagtggaacgagaccctgcagcgcgtgtccgagaagctgaaggagtacttcccccacaagaacatcaccttccagccgtcgtccggcggcgacctcgagatcaccacgcactccttcaactgcggtggcgagttcttctactgcaacacgtcgtcgctgttcaaccgcacctacatggccacgtccaccgacatggccaactccaccgagaccaactccacgcgcatcatcacgatccggtgccgcatcaagcagatcatcaacatgtggcaggaggtgggccgcgccatgtacgcaccgcccatcgccggcaacatcacctgcatctccaacatcaccggcctcctgctgacccgcgacggcggcaagaacaacacggagaccttcgagacgttcaggccaggcggaggcaacatgaaggacaactggcgctccgagctgtacaagtacaaggtggtggaggtgaagcccctgggcgtggcacccaccaacgcccgcaggcgcgtcgtggagcgcgagaagcgcgccgtgggcatgggcgccgtgttcctgggcttcctgggcgctgcgggctccaccatgggtgccgcgtccatcaccctgaccgtgcaggcccgccagctgctctccggcatcgtgcagcagcagtccaacctcctgaaggccatcgaggcccagcagcacatgctgaagctgaccgtgtggggcatcaagcagctgcaggccagggtgctcgcgctcgagcgctacctgaaggaccagcagctgctcggcatgtggggctgctccggcaagctgatctgcaccaccaacgtgtactggaactcgtcctggtccaacaagacctacggcgacatctgggacaacatgacctggatgcagtgggagcgcgagatctccaactacaccgagatcatctacgagctcctcgaggagtcccagaaccagcaggagaagaacgagcaggatctgctcgcgctggaccgctggaactccctgtggaactggttcaacatcaccaactggctgtggtacatcaagatcttcatcatgatcgtgggcggcctgatcggcctgcgcatcatcttcgccgtgctgtcgctggtgaaccgcgtgcgccagggctgatgagaattcggtgaccgggtcccggatccagatctgctgtgcctt

SEQ ID NO: 84 - DNA, 2159 bp, Artificial Sequence
  Description of Artificial Sequence: Synthetic polynucleotide
gtcgacaagaagccaccatgcgcgtgatgggcatccagcgcaactacccgcagtggtggatctggtcgatgctgggcttctggatgctcatgatctgcaacggcatgtgggtgacggtgtactacggcgtgccggtgtggaaggaggccaagacgaccctgttctgcgcgtcggacgccaaggcctacgagaaggaggtgcacaacgtgtgggcgacccacgcctgcgtgcccacggaccccaacccgcaggagatggtgctgaagaacgtgaccgagaacttcaacatgtggaagaacgacatggtggaccagatgcacgaggacgtgatctccctgtgggaccagtccctgaagccctgcgtgaagctgaccccgctgtgcgtgaccctgaactgcaccaacgcgacgacgaacgccaccgcgtccaactcgtccatcatcgaggagatgaagaactgctccttcaacatcacgacggagctgcgcgacaagcgcgagaagaagaacgccctgttctacaagctggacatcgtgcagctggacggcaactcctcgcagtacaggctgatcaactgcaacacctccgtcatcacgcaggcgtgccccaaggtgtccttcgaccccatccccatccactactgcgcccccgccggctacgccatcctgaagtgcaacaacaagaccttcaccggcaccggcccgtgcaacaacgtgtccaccgtgcagtgcacgcacgggatcaagcccgtggtgtccacgcagctgctcctgaacgggtcgctggccgagggcgagatcatcatccggtccgagaacatcacgaacacggcgaagaccatcatcgtgcacctgaacgagtccgtgaagatcgagtgcacccgcccgaacaacaagacgcgcacctccatccggatcggccctggccaggccttctacgccaccggccaggtgatcggcgacatccgcgaggcgtactgcaacatctcggagtccaagtggaacgagaccctgcagcgcgtgtccaagaagctgaaggagtacttcccccacaagaacatcaccttccagccgtcgtccggcggcgacctcgagatcaccacgcactccttcaactgcggtggcgagttcttctactgcaacacgtcgtcgctgttcaaccgcacctacatggccaactccaccgacatggccaactccaccgagaccaactccacgcgcaccatcacgatccggtgccgcatcaagcagatcatcaacatgtggcaggaggtgggccgcgccatgtacgcaccgcccatcgccggcaacatcacctgcatctccaacatcaccggcctcctgctgacccgcgacggcggcgagaacaacacggagaccttcaggccaggcggaggcaacatgaaggacaactggcgctccgagctgtacaagtacaaggtggtggaggtgaagcccctgggcgtggcacccaccaacgcccgcaggcgcgtcgtggagcgcgagaagcgcgccgtgggcatgggcgccgtgttcctgggcttcctgggcgctgcgggctccaccatgggtgccgcgtccatcaccctgaccgtgcaggcccgccagctgctctccggcatcgtgcagcagcagtccaacctcctgaaggccatcgaggcccagcagcacatgctgaagctgaccgtgtggggcatcaagcagctgcaggccagggtgctcgcgctcgagcgctacctgaaggaccagcagctgctcggcatgtggggctgctccggcaagctgatctgcaccaccaacgtgtactggaactcgtcctggtccaacaagacctacggcgacatctgggacaacatgacctggatgcagtgggagcgcgagatctccaactacaccgagatcatctacgagctcctcgaggagtcccagaaccagcaggagaagaacgagcaggatctgctcgcgctggaccgctggaactccctgtggaactggttcaacatcaccaactggctgtggtacatcaagatcttcatcatgatcgtgggcggcctgatcggcctgcgcatcatcttcgccgtgctgtcgctggtgaaccgcgtgcgccagggctgatgagggtcccgaattcggttaccggatccagatctgctgtgcctt

SEQ ID NO: 85 - DNA, 2153 bp, Artificial Sequence
  Description of Artificial Sequence: Synthetic polynucleotide
gtcgacaagaagccaccatgcgcgtgacgggcatccagcgcaactacccgcagtggtggatctggtcgatgctgggcctctggatgctcatgatctgcaacggcatgtgggtgacggtgtactacggcgtgccggtgtggaaggaggccaagacgaccctgttctgcgcgtcggacgccaaggcctacgagaaggaggtgcacaacgtgtgggcgacccacgcctgcgtgcccacggaccccaacccgcaggagatggtgctgaagaacgtgaccgagaacttcaacatgtggaagaacgacatggcggaccagatgcacgaggacgtgatctccctgtgggaccagtccctgaagccctgcgtgaagctgaccccgctgtgcgtgaccctgaactgcatcgacgccaacgcgaccgcgtccaacgcgacggcatccaactcgtccatcatcgaggggatgaagaactgctccttcaacatcacgacggagctgcgcgacaagatcgagaagaagaacgccctgttctacaagctggacatcgtgcagctggacggcaactcctcgcagtacaggctgatcaactgcaacacctccgtcatcacgcaggcgtgccccaaggtgtccttcgaccccatccccatccactactgcgcccccgccggctacgccatcctgaagtgcaacaacaagaccttcaacggcaccggcccgtgcaacaacgtgtccaccgtgcagtgcacgcacgggatcaagcccgtggtgtccacgcagctgctcctgaacgggtcgctggccgagggcgagatcatcatccggtcggagaacatcacgaacagcgcgaagaccatcatcgtgcacctgaacgagtccgtgaagatcgagtgcacccgcccgagcaacaacacgcgcacctccatccggatcggccctggccaggccttctacgccaccggccaggtgatcggcgacatccgcaaggcgcactgcaacatctccgagtccaagtggaacgagaccctgcagcgcgtgtccaagaagctgaaggagtacttcccccacaagaacatcaccttccagccgtcgtccggcggcgacctcgagatcaccacgcactccttcaactgcggtggcgagttcttctactgcaacacgtcgtcgctgttcaaccgcacctacatggccaactccaccgagaccaactccacgcgcacgatcacgctccactgccgcatcaagcagatcatcaacatgtggcaggaggtgggccgcgccatgtacgcaccgcccatcgccggcaacatcacctgcatctccaacatcaccggcctcctgctgacccgcgacggcggcaacaacaacaccacggagaccttcaggccagggggaggcaacatgaaggacaactggcgctccgagctgtacaagtacaaggtggtggagatcaagcccctgggcgtggcacccaccaacgcccgcaggcgcgtcgtggagcgcgagaagcgcgccgtgggcatgggcgccgtgttcctgggcttcctgggcgctgcgggctccaccatgggtgccgcgtccatcaccctgaccgtgcaggcccgccagctgctctccggcatcgtgcagcagcagtccaacctcctgaaggccatcgaggcccagcagcacatgctgaagctgaccgtgtggggcatcaagcagctgcaggccagggtgctcgcgctcgagcgctacctgaaggaccagcagctgctcggcatgtggggctgctccggcaagctgatctgcaccaccaacgtgtactggaactcgtcctggtccaacaagacctacggcgacatctgggacaacatgacctggatgcagtgggagcgcgagatctccgactacaccgagatcatctacgagctcctcgaggagtcccagaaccagcaggagaagaacgagcaggatctgctcgcgctggaccgctggaactccctgtggaactggttcaacatcaccaactggctgtggtacatcaagatcttcatcatgatcgtgggcggcctgatcggcctgcgcatcatcttcgccgtgctgtcgctggtgaaccgcgtgcgccagggctgatgagaattcggtaaccaggtcccggatccagatctgctgtgcctt

SEQ ID NO: 86 - DNA, 2198 bp, Artificial Sequence
  Description of Artificial Sequence: Synthetic polynucleotide
gtcgacaagaagccaccatgaaggtgcggggcatccagcgcaactacccgcagtggtggatctggtcgatgctgggcctctggatgctcatgatctgcaacggcatgtgggtgacggtgtactacggcgtgccggtgtggaaggaggccaagacgaccctgttctgcgcgtcggacgccaaggcctacgagaaggaggtgcacaacgtgtgggcgacccacgcctgcgtgcccacggaccccaacccgcaggagatggtgctggagaacgtgaccgagaacttcaacatgtggaagaacgacatggcggaccagatgcacgaggacgtgatctccctgtgggaccagtccctgaagccctgcgtgaagctgaccccgctgtgcgtgaccctgaactgcacggacgccaacgccaccgcgtcgaacaccaacgcgaccgcaagcaacatcaacgcgacggcgtcgaagtcctccatcatcgaggagatgaagaactgctccttcaacatcacgacggagctgcgcgacaagcgcgagaagaagtacgccctgttctacaagctggacatcgtgcagctggacggcaactcctcgcagtacaggctgatcaactgcaacacctccgtcatcacgcaggcgtgccccaaggtgtccttcgaccccatccccatccactactgcgcccccgccggctacgccatcctgaagtgcaacaacaagaccttcaacggcaccggcccgtgcaacaacgtgtccaccgtgcagtgcacgcacgggatcaagcccgtggtgtccacgcagctgctcctgaacgggtcgctggccgagggcgagatcatcatccggtcggagaacatcacggacaacagcaagaccatcatcgtgcacctgaacgagtccgtgaagatcgagtgcacccgcccgagcaacaacacgcgcacctccatccggatcggccctggccaggccttctacgccaccggccaagtgatcggcgacatccgcgaggcgcactgcaacatctccgagtccaagtggaacgagaccctgcagcgcgtgtccaagaagctgaaggagtacttccccgacaagaacatcaccttccagccgtcgtccggcggcgaccccgagatcaccacgcactccttcaactgcggtggcgagttcttctactgcaacacgtcgtccctgttcaaccgcacctacatggcgaactccaccgagaccaactccacgcgcaccatcacgctgcactgccgcatcaagcagatcatcaacatgtggcaggaggtgggccgcgccatgtacgcaccgcccatcgccggcaacatcacctgcatctccaacatcaccggcctcctgctgacccgcgacggcggcgagaacacccgggacggaggcaacaacaacacggagaccttcaggccagagggaggcaacatgaaggacaactggcgctccgagctgtacaagtacaaggtggtggaggtgaagcccctgggcgtggcacccaccaaggcccgcaggcgcgtcgtggagcgcgagaagcgcgccgtgggcatgggcgccgtgttcctgggcttcctgggcgctgcgggctccaccatgggtgccgcgtccatcaccctgaccgtgcaggcccgccagctgctctccggcatcgtgcagcagcagtccaacctcctgaaggccatcgaggcccagcagcacatgctgaagctgaccgtgtggggcatcaagcagctgcaggccagggtgctcgcgctcgagcgctacctgaaggaccagcagctgctcggcatgtggggctgctccggcaagctgatctgcaccaccaacgtgtactggaactcgtcctggtccaacaagacctacggcgacatctgggacaacatgacctggatgcagtgggagcgcgagatctccaactacaccgacatcatctacgacctcctcgaggagtcccagaaccagcaggagaagaacgagcaggatctgctcgcgctggaccgctggaactccctgtggaactggttcaacatcaccaagtggctgtggtacatcaagatcttcatcatgatcgtgggcggcctgatcggcctgcgcatcatcttcgccgtgctgtcgctggtgaaccgcgtgcgccagggctgatgaggtaaccgggacccgaattcggatccagatctgctgtgcctt

SEQ ID NO: 87 - DNA, 2143 bp, Artificial Sequence; identical to SEQ ID NO: 30
  Description of Artificial Sequence: Synthetic polynucleotide

SEQ ID NO: 88 - protein, 694 aa, Artificial Sequence; identical to SEQ ID NO: 31
  Description of Artificial Sequence: Synthetic polypeptide

SEQ ID NO: 89 - protein, 694 aa, Artificial Sequence; identical to SEQ ID NO: 32
  Description of Artificial Sequence: Synthetic polypeptide

SEQ ID NO: 90 - protein, 694 aa, Artificial Sequence; identical to SEQ ID NO: 33
  Description of Artificial Sequence: Synthetic polypeptide

SEQ ID NO: 91 - protein, 694 aa, Artificial Sequence; identical to SEQ ID NO: 34
  Description of Artificial Sequence: Synthetic polypeptide

SEQ ID NO: 92 - protein, 698 aa, Artificial Sequence; identical to SEQ ID NO: 35
  Description of Artificial Sequence: Synthetic polypeptide

SEQ ID NO: 93 - protein, 707 aa, Artificial Sequence
  Description of Artificial Sequence: Synthetic polypeptide
MRVMGIQRNYPQWWIWSMLGFWMLMICNGMWVTVYYGVPVWKEAKTTLFCASDAKAYEKEVHNVWATHACVPTDPNPQEMVLKNVTENFNMWKNDMVDQMHEDVISLWDQSLKPCVKLTPLCVTLNCTNANATASNSSIIEGMNSSIIEGMKNCSFNITTELRDKREKKNALFYKLDIVQLDGNSSQYRLINCNTSVITQACPKVSFDPIPIHYCAPAGYAILKCNNKTFNGTGPCNNVSTVQCTHGIKPVVSTQLLLNGSLAEGEIIIRSENITDNGKTIIVHLNESVKIECTRPSNNTRTSIRIGPGQAFYATGQVIGDIREAHCNISESKWNETLQRVSEKLKEYFPHKNITFQPSSGGDLEITTHSFNCGGEFFYCNTSSLFNRTYMATSTDMANSTETNSTRIITIRCRIKQIINMWQEVGRAMYAPPIAGNITCISNITGLLLTRDGGKNNTETFETFRPGGGNMKDNWRSELYKYKVVEVKPLGVAPTNARRRVVEREKRAVGMGAVFLGFLGAAGSTMGAASITLTVQARQLLSGIVQQQSNLLKAIEAQQHMLKLTVWGIKQLQARVLALERYLKDQQLLGMWGCSGKLICTTNVYWNSSWSNKTYGDIWDNMTWMQWEREISNYTEIIYELLEESQNQQEKNEQDLLALDRWNSLWNWFNITNWLWYIKIFIMIVGGLIGLRIIFAVLSLVNRVRQG

SEQ ID NO: 94 - protein, 698 aa, Artificial Sequence
  Description of Artificial Sequence: Synthetic polypeptide
MRVMGIQRNYPQWWIWSMLGFWMLMICNGMWVTVYYGVPVWKEAKTTLFCASDAKAYEKEVHNVWATHACVPTDPNPQEMVLKNVTENFNMWKNDMVDQMHEDVISLWDQSLKPCVKLTPLCVTLNCTNATTNATASNSSIIEEMKNCSFNITTELRDKREKKNALFYKLDIVQLDGNSSQYRLINCNTSVITQACPKVSFDPIPIHYCAPAGYAILKCNNKTFTGTGPCNNVSTVQCTHGIKPVVSTQLLLNGSLAEGEIIIRSENITNTAKTIIVHLNESVKIECTRPNNKTRTSIRIGPGQAFYATGQVIGDIREAYCNISESKWNETLQRVSKKLKEYFPHKNITFQPSSGGDLEITTHSFNCGGEFFYCNTSSLFNRTYMANSTDMANSTETNSTRTITIRCRIKQIINMWQEVGRAMYAPPIAGNITCISNITGLLLTRDGGENNTETFRPGGGNMKDNWRSELYKYKVVEVKPLGVAPTNARRRVVEREKRAVGMGAVFLGFLGAAGSTMGAASITLTVQARQLLSGIVQQQSNLLKAIEAQQHMLKLTVWGIKQLQARVLALERYLKDQQLLGMWGCSGKLICTTNVYWNSSWSNKTYGDIWDNMTWMQWEREISNYTEIIYELLEESQNQQEKNEQDLLALDRWNSLWNWFNITNWLWYIKIFIMIVGGLIGLRIIFAVLSLVNRVRQG

SEQ ID NO: 95 - protein, 696 aa, Artificial Sequence
  Description of Artificial Sequence: Synthetic polypeptide
MRVTGIQRNYPQWWIWSMLGLWMLMICNGMWVTVYYGVPVWKEAKTTLFCASDAKAYEKEVHNVWATHACVPTDPNPQEMVLKNVTENFNMWKNDMADQMHEDVISLWDQSLKPCVKLTPLCVTLNCIDANATASNATASNSSIIEGMKNCSFNITTELRDKIEKKNALFYKLDIVQLDGNSSQYRLINCNTSVITQACPKVSFDPIPIHYCAPAGYAILKCNNKTFNGTGPCNNVSTVQCTHGIKPVVSTQLLLNGSLAEGEIIIRSENITNSAKTIIVHLNESVKIECTRPSNNTRTSIRIGPGQAFYATGQVIGDIRKAHCNISESKWNETLQRVSKKLKEYFPHKNITFQPSSGGDLEITTHSFNCGGEFFYCNTSSLFNRTYMANSTETNSTRTITLHCRIKQIINMWQEVGRAMYAPPIAGNITCISNITGLLLTRDGGNNNTTETFRPGGGNMKDNWRSELYKYKVVEIKPLGVAPTNARRRVVEREKRAVGMGAVFLGFLGAAGSTMGAASITLTVQARQLLSGIVQQQSNLLKAIEAQQHMLKLTVWGIKQLQARVLALERYLKDQQLLGMWGCSGKLICTTNVYWNSSWSNKTYGDIWDNMTWMQWEREISDYTEIIYELLEESQNQQEKNEQDLLALDRWNSLWNWFNITNWLWYIKIFIMIVGGLIGLRIIFAVLSLVNRVRQG

SEQ ID NO: 96 - protein, 711 aa, Artificial Sequence
  Description of Artificial Sequence: Synthetic polypeptide
MKVRGIQRNYPQWWIWSMLGLWMLMICNGMWVTVYYGVPVWKEAKTTLFCASDAKAYEKEVHNVWATHACVPTDPNPQEMVLENVTENFNMWKNDMADQMHEDVISLWDQSLKPCVKLTPLCVTLNCTDANATASNTNATASNINATASKSSIIEEMKNCSFNITTELRDKREKKYALFYKLDIVQLDGNSSQYRLINCNTSVITQACPKVSFDPIPIHYCAPAGYAILKCNNKTFNGTGPCNNVSTVQCTHGIKPVVSTQLLLNGSLAEGEIIIRSENITDNSKTIIVHLNESVKIECTRPSNNTRTSIRIGPGQAFYATGQVIGDIREAHCNISESKWNETLQRVSKKLKEYFPDKNITFQPSSGGDPEITTHSFNCGGEFFYCNTSSLFNRTYMANSTETNSTRTITLHCRIKQIINMWQEVGRAMYAPPIAGNITCISNITGLLLTRDGGENTRDGGNNNTETFRPEGGNMKDNWRSELYKYKVVEVKPLGVAPTKARRRVVEREKRAVGMGAVFLGFLGAAGSTMGAASITLTVQARQLLSGIVQQQSNLLKAIEAQQHMLKLTVWGIKQLQARVLALERYLKDQQLLGMWGCSGKLICTTNVYWNSSWSNKTYGDIWDNMTWMQWEREISNYTDIIYDLLEESQNQQEKNEQDLLALDRWNSLWNWFNITKWLWYIKIFIMIVGGLIGLRIIFAVLSLVNRVRQG

SEQ ID NO: 97 - protein, 697 aa, Artificial Sequence; identical to SEQ ID NO: 36
  Description of Artificial Sequence: Synthetic polypeptide

SEQ ID NO: 98 - protein, 698 aa, Artificial Sequence; identical to SEQ ID NO: 35
  Description of Artificial Sequence: Synthetic polypeptide

SEQ ID NO: 99 - DNA, 32 bp, Artificial Sequence; identical to SEQ ID NO: 38
  Description of Artificial Sequence: Synthetic oligonucleotide

SEQ ID NO: 100 - DNA, 32 bp, Artificial Sequence; identical to SEQ ID NO: 39
  Description of Artificial Sequence: Synthetic oligonucleotide

SEQ ID NO: 101 - DNA, 32 bp, Artificial Sequence; identical to SEQ ID NO: 40
  Description of Artificial Sequence: Synthetic oligonucleotide

SEQ ID NO: 102 - DNA, 32 bp, Artificial Sequence; identical to SEQ ID NO: 41
  Description of Artificial Sequence: Synthetic oligonucleotide

SEQ ID NO: 103 - DNA, 32 bp, Artificial Sequence; identical to SEQ ID NO: 42
  Description of Artificial Sequence: Synthetic oligonucleotide

SEQ ID NO: 104 - DNA, 32 bp, Artificial Sequence
  Description of Artificial Sequence: Synthetic oligonucleotide
tagtaagaattcggtgaccgggtcccggatcc

SEQ ID NO: 105 - DNA, 1507 bp, Artificial Sequence; identical to SEQ ID NO: 44
  Description of Artificial Sequence: Synthetic polynucleotide

SEQ ID NO: 106 - DNA, 1507 bp, Artificial Sequence; identical to SEQ ID NO: 45
  Description of Artificial Sequence: Synthetic polynucleotide

SEQ ID NO: 107 - DNA, 1507 bp, Artificial Sequence; identical to SEQ ID NO: 46
  Description of Artificial Sequence: Synthetic polynucleotide

SEQ ID NO: 108 - DNA, 1507 bp, Artificial Sequence; identical to SEQ ID NO: 47
  Description of Artificial Sequence: Synthetic polynucleotide

SEQ ID NO: 109 - DNA, 1516 bp, Artificial Sequence; identical to SEQ ID NO: 48
  Description of Artificial Sequence: Synthetic polynucleotide

SEQ ID NO: 110 - DNA, 1546 bp, Artificial Sequence
  Description of Artificial Sequence: Synthetic polynucleotide
gtcgacaagaagccaccatgcgcgtgatgggcatccagcgcaactacccgcagtggtggatctggtcgatgctgggcttctggatgctcatgatctgcaacggcgtgccggtgtggaaggaggccaagacgaccctgttctgcgcgtcggacgccaaggcctacgagaaggaggtgcacaacgtgtgggcgacccacgcctgcgtgcccacggaccccaacccgcaggagatggtgctgaagaacgtgaccgagaacttcaacatgtggaagaacgacatggtggaccagatgcacgaggacgtgatctccctgtgggaccagtccctgaagccctgcgtgaagctgaccccgctgtgcgtgaccctgaactgcaccaacgcgaacgccaccgcgtccaactcctctatcatcgaggggatgaactcctccatcatcgagggcatgaagaactgctccttcaacatcacgacggagctgcgcgacaagcgcgagaagaagaacgccctgttctacaagctggacatcgtgcagctggacggcaactcctcgcagtacaggctgatcaactgcaacacctccgtcatcacgcaggcgtgccccaaggtgtccttcgaccccatccccatccactactgcgcccccgccggctacgccatcctgaagtgcaacaacaagaccttcaacggcaccggcccgtgcaacaacgtgtccaccgtgcagtgcacgcacgggatcaagcccgtggtgtccacgcagctgctcctgaacgggtcgctggccgagggcgagatcatcatccggtccgagaacatcacggacaacgggaagaccatcatcgtgcacctgaacgagtccgtgaagatcgagtgcacccgcccgagcaacaacacgcgcacctccatccggatcggccctggccaggccttctacgccaccggccaggtgatcggcgacatccgcgaggcgcactgcaacatctcggagtccaagtggaacgagaccctgcagcgcgtgtccgagaagctgaaggagtacttcccccacaagaacatcaccttccagccgtcgtccggcggcgacctcgagatcaccacgcactccttcaactgcggtggcgagttcttctactgcaacacgtcgtcgctgttcaaccgcacctacatggccacgtccaccgacatggccaactccaccgagaccaactccacgcgcatcatcacgatccggtgccgcatcaagcagatcatcaacatgtggcaggaggtgggccgcgccatgtacgcaccgcccatcgccggcaacatcacctgcatctccaacatcaccggcctcctgctgacccgcgacggcggcaagaacaacacggagaccttcgagacgttcaggccaggcggaggcaacatgaaggacaactggcgctccgagctgtacaagtacaaggtggtggaggtgaagcccctgggcgtggcacccaccaacgcccgcgagcgcgtcgtggagcgcgagaaggagtagtaagaattcggtgaccgggtcccggatcc

SEQ ID NO: 111 - DNA, 1521 bp, Artificial Sequence
  Description of Artificial Sequence: Synthetic polynucleotide
gtgtcgacaagaagccaccatgcgcgtgatgggcatccagcgcaactacccgcagtggtggatctggtcgatgctgggcttctggatgctcatgatctgcaacggcgtgccggtgtggaaggaggccaagacgaccctgttctgcgcgtcggacgccaaggcctacgagaaggaggtgcacaacgtgtgggcgacccacgcctgcgtgcccacggaccccaacccgcaggagatggtgctgaagaacgtgaccgagaacttcaacatgtggaagaacgacatggtggaccagatgcacgaggacgtgatctccctgtgggaccagtccctgaagccctgcgtgaagctgaccccgctgtgcgtgaccctgaactgcaccaacgcgacgacgaacgccaccgcgtccaactcgtccatcatcgaggagatgaagaactgctccttcaacatcacgacggagctgcgcgacaagcgcgagaagaagaacgccctgttctacaagctggacatcgtgcagctggacggcaactcctcgcagtacaggctgatcaactgcaacacctccgtcatcacgcaggcgtgccccaaggtgtccttcgaccccatccccatccactactgcgcccccgccggctacgccatcctgaagtgcaacaacaagaccttcaccggcaccggcccgtgcaacaacgtgtccaccgtgcagtgcacgcacgggatcaagcccgtggtgtccacgcagctgctcctgaacgggtcgctggccgagggcgagatcatcatccggtccgagaacatcacgaacacggcgaagaccatcatcgtgcacctgaacgagtccgtgaagatcgagtgcacccgcccgaacaacaagacgcgcacctccatccggatcggccctggccaggccttctacgccaccggccaggtgatcggcgacatccgcgaggcgtactgcaacatctcggagtccaagtggaacgagaccctgcagcgcgtgtccaagaagctgaaggagtacttcccccacaagaacatcaccttccagccgtcgtccggcggcgacctcgagatcaccacgcactccttcaactgcggtggcgagttcttctactgcaacacgtcgtcgctgttcaaccgcacctacatggccaactccaccgacatggccaactccaccgagaccaactccacgcgcaccatcacgatccggtgccgcatcaagcagatcatcaacatgtggcaggaggtgggccgcgccatgtacgcaccgcccatcgccggcaacatcacctgcatctccaacatcaccggcctcctgctgacccgcgacggcggcgagaacaacacggagaccttcaggccaggcggaggcaacatgaaggacaactggcgctccgagctgtacaagtacaaggtggtggaggtgaagcccctgggcgtggcacccaccaacgcccgcgagcgcgtcgtggagcgcgagaaggagtagtaagggtcccgaattcggttaccggatcc

SEQ ID NO: 112 - DNA, 1513 bp, Artificial Sequence
  Description of Artificial Sequence: Synthetic polynucleotide
gtcgacaagaagccaccatgcgcgtgacgggcatccagcgcaactacccgcagtggtggatctggtcgatgctgggcctctggatgctcatgatctgcaacggcgtgccggtgtggaaggaggccaagacgaccctgttctgcgcgtcggacgccaaggcctacgagaaggaggtgcacaacgtgtgggcgacccacgcctgcgtgcccacggaccccaacccgcaggagatggtgctgaagaacgtgaccgagaacttcaacatgtggaagaacgacatggcggaccagatgcacgaggacgtgatctccctgtgggaccagtccctgaagccctgcgtgaagctgaccccgctgtgcgtgaccctgaactgcatcgacgccaacgcgaccgcgtccaacgcgacggcatccaactcgtccatcatcgaggggatgaagaactgctccttcaacatcacgacggagctgcgcgacaagatcgagaagaagaacgccctgttctacaagctggacatcgtgcagctggacggcaactcctcgcagtacaggctgatcaactgcaacacctccgtcatcacgcaggcgtgccccaaggtgtccttcgaccccatccccatccactactgcgcccccgccggctacgccatcctgaagtgcaacaacaagaccttcaacggcaccggcccgtgcaacaacgtgtccaccgtgcagtgcacgcacgggatcaagcccgtggtgtccacgcagctgctcctgaacgggtcgctggccgagggcgagatcatcatccggtcggagaacatcacgaacagcgcgaagaccatcatcgtgcacctgaacgagtccgtgaagatcgagtgcacccgcccgagcaacaacacgcgcacctccatccggatcggccctggccaggccttctacgccaccggccaggtgatcggcgacatccgcaaggcgcactgcaacatctccgagtccaagtggaacgagaccctgcagcgcgtgtccaagaagctgaaggagtacttcccccacaagaacatcaccttccagccgtcgtccggcggcgacctcgagatcaccacgcactccttcaactgcggtggcgagttcttctactgcaacacgtcgtcgctgttcaaccgcacctacatggccaactccaccgagaccaactccacgcgcacgatcacgctccactgccgcatcaagcagatcatcaacatgtggcaggaggtgggccgcgccatgtacgcaccgcccatcgccggcaacatcacctgcatctccaacatcaccggcctcctgctgacccgcgacggcggcaacaacaacaccacggagaccttcaggccagggggaggcaacatgaaggacaactggcgctccgagctgtacaagtacaaggtggtggagatcaagcccctgggcgtggcacccaccaacgcccgcgagcgcgtcgtggagcgcgagaaggagtagtaagaattcggtaaccaggtcccggatcc

SEQ ID NO: 113 - DNA, 1558 bp, Artificial Sequence
  Description of Artificial Sequence: Synthetic polynucleotide
gtcgacaagaagccaccatgaaggtgcggggcatccagcgcaactacccgcagtggtggatctggtcgatgctgggcctctggatgctcatgatctgcaacggcgtgccggtgtggaaggaggccaagacgaccctgttctgcgcgtcggacgccaaggcctacgagaaggaggtgcacaacgtgtgggcgacccacgcctgcgtgcccacggaccccaacccgcaggagatggtgctggagaacgtgaccgagaacttcaacatgtggaagaacgacatggcggaccagatgcacgaggacgtgatctccctgtgggaccagtccctgaagccctgcgtgaagctgaccccgctgtgcgtgaccctgaactgcacggacgccaacgccaccgcgtcgaacaccaacgcgaccgcaagcaacatcaacgcgacggcgtcgaagtcctccatcatcgaggagatgaagaactgctccttcaacatcacgacggagctgcgcgacaagcgcgagaagaagtacgccctgttctacaagctggacatcgtgcagctggacggcaactcctcgcagtacaggctgatcaactgcaacacctccgtcatcacgcaggcgtgccccaaggtgtccttcgaccccatccccatccactactgcgcccccgccggctacgccatcctgaagtgcaacaacaagaccttcaacggcaccggcccgtgcaacaacgtgtccaccgtgcagtgcacgcacgggatcaagcccgtggtgtccacgcagctgctcctgaacgggtcgctggccgagggcgagatcatcatccggtcggagaacatcacggacaacagcaagaccatcatcgtgcacctgaacgagtccgtgaagatcgagtgcacccgcccgagcaacaacacgcgcacctccatccggatcggccctggccaggccttctacgccaccggccaagtgatcggcgacatccgcgaggcgcactgcaacatctccgagtccaagtggaacgagaccctgcagcgcgtgtccaagaagctgaaggagtacttccccgacaagaacatcaccttccagccgtcgtccggcggcgaccccgagatcaccacgcactccttcaactgcggtggcgagttcttctactgcaacacgtcgtccctgttcaaccgcacctacatggcgaactccaccgagaccaactccacgcgcaccatcacgctgcactgccgcatcaagcagatcatcaacatgtggcaggaggtgggccgcgccatgtacgcaccgcccatcgccggcaacatcacctgcatctccaacatcaccggcctcctgctgacccgcgacggcggcgagaacacccgggacggaggcaacaacaacacggagaccttcaggccagagggaggcaacatgaaggacaactggcgctccgagctgtacaagtacaaggtggtggaggtgaagcccctgggcgtggcacccaccaaggcccgcgagcgcgtcgtggagcgcgagaaggagtagtaaggtaaccgggacccgaattcggatcc

SEQ ID NO: 114 - DNA, 1519 bp, Artificial Sequence; identical to SEQ ID NO: 49
  Description of Artificial Sequence: Synthetic polynucleotide

SEQ ID NO: 115 - protein, 486 aa, Artificial Sequence; identical to SEQ ID NO: 50
  Description of Artificial Sequence: Synthetic polypeptide

SEQ ID NO: 116 - protein, 486 aa, Artificial Sequence; identical to SEQ ID NO: 51
  Description of Artificial Sequence: Synthetic polypeptide

SEQ ID NO: 117 - protein, 486 aa, Artificial Sequence; identical to SEQ ID NO: 52
  Description of Artificial Sequence: Synthetic polypeptide

SEQ ID NO: 118 - protein, 486 aa, Artificial Sequence; identical to SEQ ID NO: 53
  Description of Artificial Sequence: Synthetic polypeptide

SEQ ID NO: 119 - protein, 489 aa, Artificial Sequence; identical to SEQ ID NO: 54
  Description of Artificial Sequence: Synthetic polypeptide

SEQ ID NO: 120 - protein, 499 aa, Artificial Sequence
  Description of Artificial Sequence: Synthetic polypeptide
MRVMGIQRNYPQWWIWSMLGFWMLMICNGVPVWKEAKTTLFCASDAKAYEKEVHNVWATHACVPTDPNPQEMVLKNVTENFNMWKNDMVDQMHEDVISLWDQSLKPCVKLTPLCVTLNCTNANATASNSSIIEGMNSSIIEGMKNCSFNITTELRDKREKKNALFYKLDIVQLDGNSSQYRLINCNTSVITQACPKVSFDPIPIHYCAPAGYAILKCNNKTFNGTGPCNNVSTVQCTHGIKPVVSTQLLLNGSLAEGEIIIRSENITDNGKTIIVHLNESVKIECTRPSNNTRTSIRIGPGQAFYATGQVIGDIREAHCNISESKWNETLQRVSEKLKEYFPHKNITFQPSSGGDLEITTHSFNCGGEFFYCNTSSLFNRTYMATSTDMANSTETNSTRIITIRCRIKQIINMWQEVGRAMYAPPIAGNITCISNITGLLLTRDGGKNNTETFETFRPGGGNMKDNWRSELYKYKVVEVKPLGVAPTNARERVVEREKE

SEQ ID NO: 121 - protein, 490 aa, Artificial Sequence
  Description of Artificial Sequence: Synthetic polypeptide
MRVMGIQRNYPQWWIWSMLGFWMLMICNGVPVWKEAKTTLFCASDAKAYEKEVHNVWATHACVPTDPNPQEMVLKNVTENFNMWKNDMVDQMHEDVISLWDQSLKPCVKLTPLCVTLNCTNATTNATASNSSIIEEMKNCSFNITTELRDKREKKNALFYKLDIVQLDGNSSQYRLINCNTSVITQACPKVSFDPIPIHYCAPAGYAILKCNNKTFTGTGPCNNVSTVQCTHGIKPVVSTQLLLNGSLAEGEIIIRSENITNTAKTIIVHLNESVKIECTRPNNKTRTSIRIGPGQAFYATGQVIGDIREAYCNISESKWNETLQRVSKKLKEYFPHKNITFQPSSGGDLEITTHSFNCGGEFFYCNTSSLFNRTYMANSTDMANSTETNSTRTITIRCRIKQIINMWQEVGRAMYAPPIAGNITCISNITGLLLTRDGGENNTETFRPGGGNMKDNWRSELYKYKVVEVKPLGVAPTNARERVVEREKE

SEQ ID NO: 122 - protein, 488 aa, Artificial Sequence
  Description of Artificial Sequence: Synthetic polypeptide
MRVTGIQRNYPQWWIWSMLGLWMLMICNGVPVWKEAKTTLFCASDAKAYEKEVHNVWATHACVPTDPNPQEMVLKNVTENFNMWKNDMADQMHEDVISLWDQSLKPCVKLTPLCVTLNCIDANATASNATASNSSIIEGMKNCSFNITTELRDKIEKKNALFYKLDIVQLDGNSSQYRLINCNTSVITQACPKVSFDPIPIHYCAPAGYAILKCNNKTFNGTGPCNNVSTVQCTHGIKPVVSTQLLLNGSLAEGEIIIRSENITNSAKTIIVHLNESVKIECTRPSNNTRTSIRIGPGQAFYATGQVIGDIRKAHCNISESKWNETLQRVSKKLKEYFPHKNITFQPSSGGDLEITTHSFNCGGEFFYCNTSSLFNRTYMANSTETNSTRTITLHCRIKQIINMWQEVGRAMYAPPIAGNITCISNITGLLLTRDGGNNNTTETFRPGGGNMKDNWRSELYKYKVVEIKPLGVAPTNARERVVEREKE

SEQ ID NO: 123 - protein, 503 aa, Artificial Sequence
  Description of Artificial Sequence: Synthetic polypeptide
MKVRGIQRNYPQWWIWSMLGLWMLMICNGVPVWKEAKTTLFCASDAKAYEKEVHNVWATHACVPTDPNPQEMVLENVTENFNMWKNDMADQMHEDVISLWDQSLKPCVKLTPLCVTLNCTDANATASNTNATASNINATASKSSIIEEMKNCSFNITTELRDKREKKYALFYKLDIVQLDGNSSQYRLINCNTSVITQACPKVSFDPIPIHYCAPAGYAILKCNNKTFNGTGPCNNVSTVQCTHGIKPVVSTQLLLNGSLAEGEIIIRSENITDNSKTIIVHLNESVKIECTRPSNNTRTSIRIGPGQAFYATGQVIGDIREAHCNISESKWNETLQRVSKKLKEYFPDKNITFQPSSGGDPEITTHSFNCGGEFFYCNTSSLFNRTYMANSTETNSTRTITLHCRIKQIINMWQEVGRAMYAPPIAGNITCISNITGLLLTRDGGENTRDGGNNNTETFRPEGGNMKDNWRSELYKYKVVEVKPLGVAPTKARERVVEREKE

SEQ ID NO: 124 - protein, 490 aa, Artificial Sequence; identical to SEQ ID NO: 55
  Description of Artificial Sequence: Synthetic polypeptide

SEQ ID NO: 125 - DNA, 2581 bp, Artificial Sequence; identical to SEQ ID NO: 56
  Description of Artificial Sequence: Synthetic polynucleotide

SEQ ID NO: 126 - DNA, 2581 bp, Artificial Sequence; identical to SEQ ID NO: 57
  Description of Artificial Sequence: Synthetic polynucleotide

SEQ ID NO: 127 - DNA, 2581 bp, Artificial Sequence; identical to SEQ ID NO: 58
  Description of Artificial Sequence: Synthetic polynucleotide

SEQ ID NO: 128 - DNA, 2581 bp, Artificial Sequence; identical to SEQ ID NO: 59
  Description of Artificial Sequence: Synthetic polynucleotide

SEQ ID NO: 129 - DNA, 2590 bp, Artificial Sequence; identical to SEQ ID NO: 60
  Description of Artificial Sequence: Synthetic polynucleotide

SEQ ID NO: 130 - DNA, 2620 bp, Artificial Sequence
  Description of Artificial Sequence: Synthetic polynucleotide
gtcgacaagaaatgcgcgtgatgggcatccagcgcaactacccgcagtggtggatctggtcgatgctgggcttctggatgctcatgatctgcaacggcatgtgggtgacggtgtactacggcgtgccggtgtggaaggaggccaagacgaccctgttctgcgcgtcggacgccaaggcctacgagaaggaggtgcacaacgtgtgggcgacccacgcctgcgtgcccacggaccccaacccgcaggagatggtgctgaagaacgtgaccgagaacttcaacatgtggaagaacgacatggtggaccagatgcacgaggacgtgatctccctgtgggaccagtccctgaagccctgcgtgaagctgaccccgctgtgcgtgaccctgaactgcaccaacgcgaacgccaccgcgtccaactcctctatcatcgaggggatgaactcctccatcatcgagggcatgaagaactgctccttcaacatcacgacggagctgcgcgacaagcgcgagaagaagaacgccctgttctacaagctggacatcgtgcagctggacggcaactcctcgcagtacaggctgatcaactgcaacacctccgtcatcacgcaggcgtgccccaaggtgtccttcgaccccatccccatccactactgcgcccccgccggctacgccatcctgaagtgcaacaacaagaccttcaacggcaccggcccgtgcaacaacgtgtccaccgtgcagtgcacgcacgggatcaagcccgtggtgtccacgcagctgctcctgaacgggtcgctggccgagggcgagatcatcatccggtccgagaacatcacggacaacgggaagaccatcatcgtgcacctgaacgagtccgtgaagatcgagtgcacccgcccgagcaacaacacgcgcacctccatccggatcggccctggccaggccttctacgccaccggccaggtgatcggcgacatccgcgaggcgcactgcaacatctcggagtccaagtggaacgagaccctgcagcgcgtgtccgagaagctgaaggagtacttcccccacaagaacatcaccttccagccgtcgtccggcggcgacctcgagatcaccacgcactccttcaactgcggtggcgagttcttctactgcaacacgtcgtcgctgttcaaccgcacctacatggccacgtccaccgacatggccaactccaccgagaccaactccacgcgcatcatcacgatccggtgccgcatcaagcagatcatcaacatgtggcaggaggtgggccgcgccatgtacgcaccgcccatcgccggcaacatcacctgcatctccaacatcaccggcctcctgctgacccgcgacggcggcaagaacaacacggagaccttcgagacgttcaggccaggcggaggcaacatgaaggacaactggcgctccgagctgtacaagtacaaggtggtggaggtgaagcccctgggcgtggcacccaccaacgcccgcaggcgcgtcgtggagcgcgagaagcgcgccgtgggcatgggcgccgtgttcctgggcttcctgggcgctgcgggctccaccatgggtgccgcgtccatcaccctgaccgtgcaggcccgccagctgctctccggcatcgtgcagcagcagtccaacctcctgaaggccatcgaggcccagcagcacatgctgaagctgaccgtgtggggcatcaagcagctgcaggccagggtgctcgcgctcgagcgctacctgaaggaccagcagctgctcggcatgtggggctgctccggcaagctgatctgcaccaccaacgtgtactggaactcgtcctggtccaacaagacctacggcgacatctgggacaacatgacctggatgcagtgggagcgcgagatctccaactacaccgagatcatctacgagctcctcgaggagtcccagaaccagcaggagaagaacgagcaggatctgctcgcgctggaccgctggaactccctgtggaactggttcaacatcaccaactggctgtggtacatcaagatcttcatcatgatcgtgggcggcctgatcggcctgcgcatcatcttcgccgtgctgtcgctggtgaaccgcgtgcgccagggctactccccgctgtccctgcaaacgctgatcccctccccccggggcccggacaggcccggtggcatcgaggaggagggcggcgagcaggaccgcaaccgctccacgcgcctggtgtccggcttcctggccctggcgtgggacgacctgcgctccctgtgcctgttcatctaccaccgcctgcgcgacttcatcctgatcgcggcccgcgctggcgagctgctgggccggtcctcgctgaagggcctgcgccgcggctgggaggccctgaagtacctgggctcgctggtgcagtactggggcctggagctgaagcgctccgccatctccctgctggacaccctggccatcgccgtgggcgagggcaccgaccgcatcctggagttcgtgctgggcatctgccgcgccatccgcaacatccccacccgcatccgccagggcttcgagaccgccctcctgtagtaagaattcggtgaccgggtcccggatcc

SEQ ID NO: 131 - DNA, 2593 bp, Artificial Sequence
  Description of Artificial Sequence: Synthetic polynucleotide
gtcgacaagaaatgcgcgtgatgggcatccagcgcaactacccgcagtggtggatctggtcgatgctgggcttctggatgctcatgatctgcaacggcatgtgggtgacggtgtactacggcgtgccggtgtggaaggaggccaagacgaccctgttctgcgcgtcggacgccaaggcctacgagaaggaggtgcacaacgtgtgggcgacccacgcctgcgtgcccacggaccccaacccgcaggagatggtgctgaagaacgtgaccgagaacttcaacatgtggaagaacgacatggtggaccagatgcacgaggacgtgatctccctgtgggaccagtccctgaagccctgcgtgaagctgaccccgctgtgcgtgaccctgaactgcaccaacgcgacgacgaacgccaccgcgtccaactcgtccatcatcgaggagatgaagaactgctccttcaacatcacgacggagctgcgcgacaagcgcgagaagaagaacgccctgttctacaagctggacatcgtgcagctggacggcaactcctcgcagtacaggctgatcaactgcaacacctccgtcatcacgcaggcgtgccccaaggtgtccttcgaccccatccccatccactactgcgcccccgccggctacgccatcctgaagtgcaacaacaagaccttcaccggcaccggcccgtgcaacaacgtgtccaccgtgcagtgcacgcacgggatcaagcccgtggtgtccacgcagctgctcctgaacgggtcgctggccgagggcgagatcatcatccggtccgagaacatcacgaacacggcgaagaccatcatcgtgcacctgaacgagtccgtgaagatcgagtgcacccgcccgaacaacaagacgcgcacctccatccggatcggccctggccaggccttctacgccaccggccaggtgatcggcgacatccgcgaggcgtactgcaacatctcggagtccaagtggaacgagaccctgcagcgcgtgtccaagaagctgaaggagtacttcccccacaagaacatcaccttccagccgtcgtccggcggcgacctcgagatcaccacgcactccttcaactgcggtggcgagttcttctactgcaacacgtcgtcgctgttcaaccgcacctacatggccaactccaccgacatggccaactccaccgagaccaactccacgcgcaccatcacgatccggtgccgcatcaagcagatcatcaacatgtggcaggaggtgggccgcgccatgtacgcaccgcccatcgccggcaacatcacctgcatctccaacatcaccggcctcctgctgacccgcgacggcggcgagaacaacacggagaccttcaggccaggcggaggcaacatgaaggacaactggcgctccgagctgtacaagtacaaggtggtggaggtgaagcccctgggcgtggcacccaccaacgcccgcaggcgcgtcgtggagcgcgagaagcgcgccgtgggcatgggcgccgtgttcctgggcttcctgggcgctgcgggctccaccatgggtgccgcgtccatcaccctgaccgtgcaggcccgccagctgctctccggcatcgtgcagcagcagtccaacctcctgaaggccatcgaggcccagcagcacatgctgaagctgaccgtgtggggcatcaagcagctgcaggccagggtgctcgcgctcgagcgctacctgaaggaccagcagctgctcggcatgtggggctgctccggcaagctgatctgcaccaccaacgtgtactggaactcgtcctggtccaacaagacctacggcgacatctgggacaacatgacctggatgcagtgggagcgcgagatctccaactacaccgagatcatctacgagctcctcgaggagtcccagaaccagcaggagaagaacgagcaggatctgctcgcgctggaccgctggaactccctgtggaactggttcaacatcaccaactggctgtggtacatcaagatcttcatcatgatcgtgggcggcctgatcggcctgcgcatcatcttcgccgtgctgtcgctggtgaaccgcgtgcgccagggctactccccgctgtccctgcaaacgctgatcccctccccccggggcccggacaggcccggtggcatcgaggaggagggcggcgagcaggaccgcaaccgctccacgcgcctggtgtccggcttcctggccctggtgtgggacgacctgcgctccctgtgcctgttcatctaccaccgcctgcgcgacttcatcctgatcgcggcccgcgctggcgagctgctgggccggtcctcgctgaagggcctgcgccgcggctgggaggccctgaagtacctgggctcgctggtgcagtactggggcctggagctgaagcgctccgccatctccctgctggacaccctggccatcgccgtgggcgagggcaccgaccgcatcctggagttcgtgctgggcatctgccgcgccatccgcaacatccccacccgcatccgccagggcttcgagaccgccctcctgtagtaagggtcccgaattcggttaccggatcc

SEQ ID NO: 132 - DNA, 2587 bp, Artificial Sequence
  Description of Artificial Sequence: Synthetic polynucleotide
gtcgacaagaaatgcgcgtgacgggcatccagcgcaactacccgcagtggtggatctggtcgatgctgggcctctggatgctcatgatctgcaacggcatgtgggtgacggtgtactacggcgtgccggtgtggaaggaggccaagacgaccctgttctgcgcgtcggacgccaaggcctacgagaaggaggtgcacaacgtgtgggcgacccacgcctgcgtgcccacggaccccaacccgcaggagatggtgctgaagaacgtgaccgagaacttcaacatgtggaagaacgacatggcggaccagatgcacgaggacgtgatctccctgtgggaccagtccctgaagccctgcgtgaagctgaccccgctgtgcgtgaccctgaactgcatcgacgccaacgcgaccgcgtccaacgcgacggcatccaactcgtccatcatcgaggggatgaagaactgctccttcaacatcacgacggagctgcgcgacaagatcgagaagaagaacgccctgttctacaagctggacatcgtgcagctggacggcaactcctcgcagtacaggctgatcaactgcaacacctccgtcatcacgcaggcgtgccccaaggtgtccttcgaccccatccccatccactactgcgcccccgccggctacgccatcctgaagtgcaacaacaagaccttcaacggcaccggcccgtgcaacaacgtgtccaccgtgcagtgcacgcacgggatcaagcccgtggtgtccacgcagctgctcctgaacgggtcgctggccgagggcgagatcatcatccggtcggagaacatcacgaacagcgcgaagaccatcatcgtgcacctgaacgagtccgtgaagatcgagtgcacccgcccgagcaacaacacgcgcacctccatccggatcggccctggccaggccttctacgccaccggccaggtgatcggcgacatccgcaaggcgcactgcaacatctccgagtccaagtggaacgagaccctgcagcgcgtgtccaagaagctgaaggagtacttcccccacaagaacatcaccttccagccgtcgtccggcggcgacctcgagatcaccacgcactccttcaactgcggtggcgagttcttctactgcaacacgtcgtcgctgttcaaccgcacctacatggccaactccaccgagaccaactccacgcgcacgatcacgctccactgccgcatcaagcagatcatcaacatgtggcaggaggtgggccgcgccatgtacgcaccgcccatcgccggcaacatcacctgcatctccaacatcaccggcctcctgctgacccgcgacggcggcaacaacaacaccacggagaccttcaggccagggggaggcaacatgaaggacaactggcgctccgagctgtacaagtacaaggtggtggagatcaagcccctgggcgtggcacccaccaacgcccgcaggcgcgtcgtggagcgcgagaagcgcgccgtgggcatgggcgccgtgttcctgggcttcctgggcgctgcgggctccaccatgggtgccgcgtccatcaccctgaccgtgcaggcccgccagctgctctccggcatcgtgcagcagcagtccaacctcctgaaggccatcgaggcccagcagcacatgctgaagctgaccgtgtggggcatcaagcagctgcaggccagggtgctcgcgctcgagcgctacctgaaggaccagcagctgctcggcatgtggggctgctccggcaagctgatctgcaccaccaacgtgtactggaactcgtcctggtccaacaagacctacggcgacatctgggacaacatgacctggatgcagtgggagcgcgagatctccgactacaccgagatcatctacgagctcctcgaggagtcccagaaccagcaggagaagaacgagcaggatctgctcgcgctggaccgctggaactccctgtggaactggttcaacatcaccaactggctgtggtacatcaagatcttcatcatgatcgtgggcggcctgatcggcctgcgcatcatcttcgccgtgctgtcgctggtgaaccgcgtgcgccagggctactccccgctgtccctgcaaacgctgacgccctccccccggggcccggacaggcccggtggcatcgaggaggagggcggcgagcaggaccgcaaccgctccacgcgcctggtgtccggcttcctggccctggcgtgggacgacctgcgctccctgtgcctgttcatctaccaccgcctgcgcgacttcatcctgatcgcggcccgcgctggcgagctgctgggccggtcctcgctgaagggcctgcgccgcggctgggaggccctgaagtacctgggcggcctggtgcagtactggggcctggagctgaagcgctccgccatctccctgctggacaccctggccatcgccgtgggcgagggcaccgaccgcatcctggagttcgtgctgggcatctgccgcgccatccgcaacatccccacccgcatccgccagggcttcgagaccgccctcctgtagtaagaattcggtaaccaggtcccggatcc

SEQ ID NO: 133 - DNA, 2632 bp, Artificial Sequence
  Description of Artificial Sequence: Synthetic polynucleotide
gtcgacaagaaatgaaggtgcggggcatccagcgcaactacccgcagtggtggatctggtcgatgctgggcctctggatgctcatgatctgcaacggcatgtgggtgacggtgtactacggcgtgccggtgtggaaggaggccaagacgaccctgttctgcgcgtcggacgccaaggcctacgagaaggaggtgcacaacgtgtgggcgacccacgcctgcgtgcccacggaccccaacccgcaggagatggtgctggagaacgtgaccgagaacttcaacatgtggaagaacgacatggcggaccagatgcacgaggacgtgatctccctgtgggaccagtccctgaagccctgcgtgaagctgaccccgctgtgcgtgaccctgaactgcacggacgccaacgccaccgcgtcgaacaccaacgcgaccgcaagcaacatcaacgcgacggcgtcgaagtcctccatcatcgaggagatgaagaactgctccttcaacatcacgacggagctgcgcgacaagcgcgagaagaagtacgccctgttctacaagctggacatcgtgcagctggacggcaactcctcgcagtacaggctgatcaactgcaacacctccgtcatcacgcaggcgtgccccaaggtgtccttcgaccccatccccatccactactgcgcccccgccggctacgccatcctgaagtgcaacaacaagaccttcaacggcaccggcccgtgcaacaacgtgtccaccgtgcagtgcacgcacgggatcaagcccgtggtgtccacgcagctgctcctgaacgggtcgctggccgagggcgagatcatcatccggtcggagaacatcacggacaacagcaagaccatcatcgtgcacctgaacgagtccgtgaagatcgagtgcacccgcccgagcaacaacacgcgcacctccatccggatcggccctggccaggccttctacgccaccggccaagtgatcggcgacatccgcgaggcgcactgcaacatctccgagtccaagtggaacgagaccctgcagcgcgtgtccaagaagctgaaggagtacttccccgacaagaacatcaccttccagccgtcgtccggcggcgaccccgagatcaccacgcactccttcaactgcggtggcgagttcttctactgcaacacgtcgtccctgttcaaccgcacctacatggcgaactccaccgagaccaactccacgcgcaccatcacgctgcactgccgcatcaagcagatcatcaacatgtggcaggaggtgggccgcgccatgtacgcaccgcccatcgccggcaacatcacctgcatctccaacatcaccggcctcctgctgacccgcgacggcggcgagaacacccgggacggaggcaacaacaacacggagaccttcaggccagagggaggcaacatgaaggacaactggcgctccgagctgtacaagtacaaggtggtggaggtgaagcccctgggcgtggcacccaccaaggcccgcaggcgcgtcgtggagcgcgagaagcgcgccgtgggcatgggcgccgtgttcctgggcttcctgggcgctgcgggctccaccatgggtgccgcgtccatcaccctgaccgtgcaggcccgccagctgctctccggcatcgtgcagcagcagtccaacctcctgaaggccatcgaggcccagcagcacatgctgaagctgaccgtgtggggcatcaagcagctgcaggccagggtgctcgcgctcgagcgctacctgaaggaccagcagctgctcggcatgtggggctgctccggcaagctgatctgcaccaccaacgtgtactggaactcgtcctggtccaacaagacctacggcgacatctgggacaacatgacctggatgcagtgggagcgcgagatctccaactacaccgacatcatctacgacctcctcgaggagtcccagaaccagcaggagaagaacgagcaggatctgctcgcgctggaccgctggaactccctgtggaactggttcaacatcaccaagtggctgtggtacatcaagatcttcatcatgatcgtgggcggcctgatcggcctgcgcatcatcttcgccgtgctgtcgctggtgaaccgcgtgcgccagggctactccccgctgtccctgcaaacgctgatcccctccccccggggcccggacaggcccggtggcatcgaggaggagggcggcgagcaggaccgcaaccgctccacgcgcctggtgtccggcttcctggccctggcgtgggacgacctgcgctccctgtgcctgttcatctaccaccgcctgcgcgacttcatcctgatcgcggcccgcgctggcgagctgctgggccggtcctcgctgaagggcctgcgccgcggctgggaggccctgaagtacctgggcgggctggtgcagtactggggcctggagctgaagcgctccgccatctccctgctggacaccctggccatcgccgtgggcgagggcaccgaccgcatcctggagttcgtgctgggcatctgccgcgccatccgcaacatccccacccgcatccgccagggcttcgagaccgccctcctgtagtaaggtaaccgggacccgaattcggatcc

SEQ ID NO: 134 - DNA, 2593 bp, Artificial Sequence; identical to SEQ ID NO: 61
  Description of Artificial Sequence: Synthetic polynucleotide

SEQ ID NO: 135 - protein, 846 aa, Artificial Sequence; identical to SEQ ID NO: 62
  Description of Artificial Sequence: Synthetic polypeptide

SEQ ID NO: 136 - protein, 846 aa, Artificial Sequence; identical to SEQ ID NO: 63
  Description of Artificial Sequence: Synthetic polypeptide

SEQ ID NO: 137 - protein, 846 aa, Artificial Sequence; identical to SEQ ID NO: 64
  Description of Artificial Sequence: Synthetic polypeptide

SEQ ID NO: 138 - protein, 846 aa, Artificial Sequence; identical to SEQ ID NO: 65
  Description of Artificial Sequence: Synthetic polypeptide

SEQ ID NO: 139 - protein, 849 aa, Artificial Sequence; identical to SEQ ID NO: 66
  Description of Artificial Sequence: Synthetic polypeptide

SEQ ID NO: 140 - protein, 859 aa, Artificial Sequence
  Description of Artificial Sequence: Synthetic polypeptide
MRVMGIQRNYPQWWIWSMLGFWMLMICNGMWVTVYYGVPVWKEAKTTLFCASDAKAYEKEVHNVWATHACVPTDPNPQEMVLKNVTENFNMWKNDMVDQMHEDVISLWDQSLKPCVKLTPLCVTLNCTNANATASNSSIIEGMNSSIIEGMKNCSFNITTELRDKREKKNALFYKLDIVQLDGNSSQYRLINCNTSVITQACPKVSFDPIPIHYCAPAGYAILKCNNKTFNGTGPCNNVSTVQCTHGIKPVVSTQLLLNGSLAEGEIIIRSENITDNGKTIIVHLNESVKIECTRPSNNTRTSIRIGPGQAFYATGQVIGDIREAHCNISESKWNETLQRVSEKLKEYFPHKNITFQPSSGGDLEITTHSFNCGGEFFYCNTSSLFNRTYMATSTDMANSTETNSTRIITIRCRIKQIINMWQEVGRAMYAPPIAGNITCISNITGLLLTRDGGKNNTETFETFRPGGGNMKDNWRSELYKYKVVEVKPLGVAPTNARRRVVEREKRAVGMGAVFLGFLGAAGSTMGAASITLTVQARQLLSGIVQQQSNLLKAIEAQQHMLKLTVWGIKQLQARVLALERYLKDQQLLGMWGCSGKLICTTNVYWNSSWSNKTYGDIWDNMTWMQWEREISNYTEIIYELLEESQNQQEKNEQDLLALDRWNSLWNWFNITNWLWYIKIFIMIVGGLIGLRIIFAVLSLVNRVRQGYSPLSLQTLIPSPRGPDRPGGIEEEGGEQDRNRSTRLVSGFLALAWDDLRSLCLFIYHRLRDFILIAARAGELLGRSSLKGLRRGWEALKYLGSLVQYWGLELKRSAISLLDTLAIAVGEGTDRILEFVLGICRAIRNIPTRIRQGFETALL

SEQ ID NO: 141 - protein, 850 aa, Artificial Sequence
  Description of Artificial Sequence: Synthetic polypeptide
MRVMGIQRNYPQWWIWSMLGFWMLMICNGMWVTVYYGVPVWKEAKTTLFCASDAKAYEKEVHNVWATHACVPTDPNPQEMVLKNVTENFNMWKNDMVDQMHEDVISLWDQSLKPCVKLTPLCVTLNCTNATTNATASNSSIIEEMKNCSFNITTELRDKREKKNALFYKLDIVQLDGNSSQYRLINCNTSVITQACPKVSFDPIPIHYCAPAGYAILKCNNKTFTGTGPCNNVSTVQCTHGIKPVVSTQLLLNGSLAEGEIIIRSENITNTAKTIIVHLNESVKIECTRPNNKTRTSIRIGPGQAFYATGQVIGDIREAYCNISESKWNETLQRVSKKLKEYFPHKNITFQPSSGGDLEITTHSFNCGGEFFYCNTSSLFNRTYMANSTDMANSTETNSTRTITIRCRIKQIINMWQEVGRAMYAPPIAGNITCISNITGLLLTRDGGENNTETFRPGGGNMKDNWRSELYKYKVVEVKPLGVAPTNARRRVVEREKRAVGMGAVFLGFLGAAGSTMGAASITLTVQARQLLSGIVQQQSNLLKAIEAQQHMLKLTVWGIKQLQARVLALERYLKDQQLLGMWGCSGKLICTTNVYWNSSWSNKTYGDIWDNMTWMQWEREISNYTEIIYELLEESQNQQEKNEQDLLALDRWNSLWNWFNITNWLWYIKIFIMIVGGLIGLRIIFAVLSLVNRVRQGYSPLSLQTLIPSPRGPDRPGGIEEEGGEQDRNRSTRLVSGFLALVWDDLRSLCLFIYHRLRDFILIAARAGELLGRSSLKGLRRGWEALKYLGSLVQYWGLELKRSAISLLDTLAIAVGEGTDRILEFVLGICRAIRNIPTRIRQGFETALL

SEQ ID NO: 142 - protein, 848 aa, Artificial Sequence
  Description of Artificial Sequence: Synthetic polypeptide
MRVTGIQRNYPQWWIWSMLGLWMLMICNGMWVTVYYGVPVWKEAKTTLFCASDAKAYEKEVHNVWATHACVPTDPNPQEMVLKNVTENFNMWKNDMADQMHEDVISLWDQSLKPCVKLTPLCVTLNCIDANATASNATASNSSIIEGMKNCSFNITTELRDKIEKKNALFYKLDIVQLDGNSSQYRLINCNTSVITQACPKVSFDPIPIHYCAPAGYAILKCNNKTFNGTGPCNNVSTVQCTHGIKPVVSTQLLLNGSLAEGEIIIRSENITNSAKTIIVHLNESVKIECTRPSNNTRTSIRIGPGQAFYATGQVIGDIRKAHCNISESKWNETLQRVSKKLKEYFPHKNITFQPSSGGDLEITTHSFNCGGEFFYCNTSSLFNRTYMANSTETNSTRTITLHCRIKQIINMWQEVGRAMYAPPIAGNITCISNITGLLLTRDGGNNNTTETFRPGGGNMKDNWRSELYKYKVVEIKPLGVAPTNARRRVVEREKRAVGMGAVFLGFLGAAGSTMGAASITLTVQARQLLSGIVQQQSNLLKAIEAQQHMLKLTVWGIKQLQARVLALERYLKDQQLLGMWGCSGKLICTTNVYWNSSWSNKTYGDIWDNMTWMQWEREISDYTEIIYELLEESQNQQEKNEQDLLALDRWNSLWNWFNITNWLWYIKIFIMIVGGLIGLRIIFAVLSLVNRVRQGYSPLSLQTLTPSPRGPDRPGGIEEEGGEQDRNRSTRLVSGFLALAWDDLRSLCLFIYHRLRDFILIAARAGELLGRSSLKGLRRGWEALKYLGGLVQYWGLELKRSAISLLDTLAIAVGEGTDRILEFVLGICRAIRNIPTRIRQGFETALL

SEQ ID NO: 143 - protein, 863 aa, Artificial Sequence
  Description of Artificial Sequence: Synthetic polypeptide
MKVRGIQRNYPQWWIWSMLGLWMLMICNGMWVTVYYGVPVWKEAKTTLFCASDAKAYEKEVHNVWATHACVPTDPNPQEMVLENVTENFNMWKNDMADQMHEDVISLWDQSLKPCVKLTPLCVTLNCTDANATASNTNATASNINATASKSSIIEEMKNCSFNITTELRDKREKKYALFYKLDIVQLDGNSSQYRLINCNTSVITQACPKVSFDPIPIHYCAPAGYAILKCNNKTFNGTGPCNNVSTVQCTHGIKPVVSTQLLLNGSLAEGEIIIRSENITDNSKTIIVHLNESVKIECTRPSNNTRTSIRIGPGQAFYATGQVIGDIREAHCNISESKWNETLQRVSKKLKEYFPDKNITFQPSSGGDPEITTHSFNCGGEFFYCNTSSLFNRTYMANSTETNSTRTITLHCRIKQIINMWQEVGRAMYAPPIAGNITCISNITGLLLTRDGGENTRDGGNNNTETFRPEGGNMKDNWRSELYKYKVVEVKPLGVAPTKARRRVVEREKRAVGMGAVFLGFLGAAGSTMGAASITLTVQARQLLSGIVQQQSNLLKAIEAQQHMLKLTVWGIKQLQARVLALERYLKDQQLLGMWGCSGKLICTTNVYWNSSWSNKTYGDIWDNMTWMQWEREISNYTDIIYDLLEESQNQQEKNEQDLLALDRWNSLWNWFNITKWLWYIKIFIMIVGGLIGLRIIFAVLSLVNRVRQGYSPLSLQTLIPSPRGPDRPGGIEEEGGEQDRNRSTRLVSGFLALAWDDLRSLCLFIYHRLRDFILIAARAGELLGRSSLKGLRRGWEALKYLGGLVQYWGLELKRSAISLLDTLAIAVGEGTDRILEFVLGICRAIRNIPTRIRQGFETALL

SEQ ID NO: 144 - protein, 850 aa, Artificial Sequence; identical to SEQ ID NO: 67
  Description of Artificial Sequence: Synthetic polypeptide

SEQ ID NO: 145 - DNA, 1509 bp, Artificial Sequence
  Description of Artificial Sequence: Synthetic polynucleotide
gtgtcgacaagaagccaccatgcgcgtgatgggcatccagcgcaactacccgcagtggtggatctggtcgatgctgggcttctggatgctcatgatctgcaacggcgtgccggtgtggaaggaggccaagacgaccctgttctgcgcgtcggacgccaaggcctacgagaaggaggtgcacaacgtgtgggcgacccacgcctgcgtgcccacggaccccaacccgcaggagatggtgctgaagaacgtgaccgagaacttcaacatgtggaagaacgacatggtggaccagatgcacgaggacgtgatctccctgtgggaccagtccctgaagccctgcgtgaagctgaccccgctgtgcgtgaccctgaactgcaccaacgccaccgcgtccaactcctccatcatcgagggcatgaagaactgctccttcaacatcacgacggagctgcgcgacaagcgcgagaagaagaacgccctgttctacaagctggacatcgtgcagctggacggcaactcctcgcagtacaggctgatcaactgcaacacctccgtcatcacgcaggcgtgccccaaggtgtccttcgaccccatccccatccactactgcgcccccgccggctacgccatcctgaagtgcaacaacaagaccttcaccggcaccggcccgtgcaacaacgtgtccaccgtgcagtgcacgcacgggatcaagcccgtggtgtccacgcagctgctcctgaacgggtcgctggccgagggcgagatcatcatccggtccgagaacatcacgaagaacgtgaagaccatcatcgtgcacctgaacgagtccgtgaagatcgagtgcacccgcccgaacaacaagacgcgcacctccatccggatcggccctggccaggccttctacgccaccggccaggtgatcggcgacatccgcgaggcgtactgcaacatcaacgagtccaagtggaacgagaccctgcagcgcgtgtccaagaagctgaaggagtacttcccccacaagaacatcaccttccagccgtcgtccggcggcgacctcgagatcaccacgcactccttcaactgcggtggcgagttcttctactgcaacacgtcgtcgctgttcaaccgcacctacatggccaactccaccgacatggccaactccaccgagaccaactccacgcgcaccatcacgatccactgccgcatcaagcagatcatcaacatgtggcaggaggtgggccgcgccatgtacgcaccgcccatcgccggcaacatcacctgcatctccaacatcaccggcctcctgctgacccgcgacggcggcaagaacaacacggagaccttcaggccaggcggaggcaacatgaaggacaactggcgctccgagctgtacaagtacaaggtggtggaggtgaagcccctgggcgtggcacccaccaacgcccgcgagcgcgtcgtggagcgcgagaaggagtagtaaggtgaccgaattcgggacccggatcc

SEQ ID NO: 146 - DNA, 1509 bp, Artificial Sequence
  Description of Artificial Sequence: Synthetic polynucleotide
gtgtcgacaagaagccaccatgcgcgtgatgggcatccagcgcaactacccgcagtggtggatctggtcgatgctgggcttctggatgctcatgatctgcaacggcgtgccggtgtggaaggaggccaagacgaccctgttctgcgcgtcggacgccaaggcctacgagaaggaggtgcacaacgtgtgggcgacccacgcctgcgtgcccacggaccccaacccgcaggagatggtgctgaagaacgtgaccgagaacttcaacatgtggaagaacgacatggtggaccagatgcacgaggacgtgatctccctgtgggaccagtccctgaagccctgcgtgaagctgaccccgctgtgcgtgaccctgaactgcaccaacgccaccgcgtccaactcctccatcatcgagggcatgaagaactgctccttcaacatcacgacggagctgcgcgacaagcgcgagaagaagaacgccctgttctacaagctggacatcgtgcagctggacggcaactcctcgcagtacaggctgatcaactgcaacacctccgtcatcacgcaggcgtgccccaaggtgtccttcgaccccatccccatccactactgcgcccccgccggctacgccatcctgaagtgcaacaacaagaccttcaccggcaccggcccgtgcaacaacgtgtccaccgtgcagtgcacgcacgggatcaagcccgtggtgtccacgcagctgctcctgaacgggtcgctggccgagggcgagatcatcatccggtccgagaacatcacggacaacgggaagaccatcatcgtgcacctgaacgagtccgtgaagatcgagtgcacccgcccgaacaacaagacgcgcacctccatccggatcggccctggccaggccttctacgccaccggccaggtgatcggcgacatccgcgaggcgtactgcaacatcaacgagtccaagtggaacgagaccctgcagcgcgtgtccaagaagctgaaggagtacttcccccacaagaacatcaccttccagccgtcgtccggcggcgacctcgagatcaccacgcactccttcaactgcggtggcgagttcttctactgcaacacgtcgtcgctgttcaaccgcacctacatggccaactccaccgacatggccaactccaccgagaccaactccacgcgcaccatcacgatccactgccgcatcaagcagatcatcaacatgtggcaggaggtgggccgcgccatgtacgcaccgcccatcgccggcaacatcacctgcatctccaacatcaccggcctcctgctgacccgcgacggcggcaagaacaacacggagaccttcaggccaggcggaggcaacatgaaggacaactggcgctccgagctgtacaagtacaaggtggtggaggtgaagcccctgggcgtggcacccaccaacgcccgcgagcgcgtcgtggagcgcgagaaggagtagtaaggtgaccgaattcaggtcccggatcc

SEQ ID NO: 147 - DNA, 1509 bp, Artificial Sequence
  Description of Artificial Sequence: Synthetic polynucleotide
gtgtcgacaagaagccaccatgcgcgtgatgggcatccagcgcaactacccgcagtggtggatctggtcgatgctgggcttctggatgctcatgatctgcaacggcgtgccggtgtggaaggaggccaagacgaccctgttctgcgcgtcggacgccaaggcctacgagaaggaggtgcacaacgtgtgggcgacccacgcctgcgtgcccacggaccccaacccgcaggagatggtgctgaagaacgtgaccgagaacttcaacatgtggaagaacgacatggtggaccagatgcacgaggacgtgatctccctgtgggaccagtccctgaagccctgcgtgaagctgaccccgctgtgcgtgaccctgaactgcaccaacgccaccgcgtccaacaactccatcatcgagggcatgaagaactgctccttcaacatcacgacggagctgcgcgacaagcgcgagaagaagaacgccctgttctacaagctggacatcgtgcagctggacggcaactcctcgcagtacaggctgatcaactgcaacacctccgtcatcacgcaggcgtgccccaaggtgtccttcgaccccatccccatccactactgcgcccccgccggctacgccatcctgaagtgcaacaacaagaccttcaccggcaccggcccgtgcaacaacgtgtccaccgtgcagtgcacgcacgggatcaagcccgtggtgtccacgcagctgctcctgaacgggtcgctggccgagggcgagatcatcatccggtccgagaacatcacgaacaacgcgaagaccatcatcgtgcacctgaacgagtccgtgaagatcgagtgcacccgcccgaacaacaagacgcgcacgtccatccggatcggccctggccaggccttctacgccaccggccaggtgatcggcgacatccgcaaggcgtactgcaacatctcggagtccaagtggaacgagaccctgcagcgcgtgtccaagaagctgaaggagtacttcccccacaagaacatcaccttccagccgtcgtccggcggcgacctcgagatcaccacgcactccttcaactgcggtggcgagttcttctactgcaacacgtcgtcgctgttcaaccgcacctacatggccaactccaccgacatggccaactccaccgagaccaactccacgcgcaccatcacgctccactgccgcatcaagcagatcatcaacatgtggcaggaggtgggccgcgccatgtacgcaccgcccatcgccggcaacatcacctgcatctccaacatcaccggcctcctgctgacccgcgacggcggcaagaacaacacggagaccttcaggccaggcggaggcaacatgaaggacaactggcgctccgagctgtacaagtacaaggtggtggaggtgaagcccctgggcgtggcacccaccaacgcccgcgagcgcgtcgtggagcgcgagaaggagtagtaagggacccgaattcggtcaccggatcc

SEQ ID NO: 148 - DNA, 1542 bp, Artificial Sequence
  Description of Artificial Sequence: Synthetic polynucleotide
gtgtcgacaagaagccaccatgcgcgtgatgggcatccagcgcaactacccgcagtggtggatctggtcgatgctgggcttctggatgctcatgatctgcaacggcgtgccggtgtggaaggaggccaagacgaccctgttctgcgcgtcggacgccaaggcctacgagaaggaggtgcacaacgtgtgggcgacccacgcctgcgtgcccacggaccccaacccgcaggagatggtgctgaagaacgtgaccgagaacttcaacatgtggaagaacgacatggtggaccagatgcacgaggacgtgatctccctgtgggaccagtccctgaagccctgcgtgaagctgaccccgctgtgcgtgaccctgaactgcaccaacgcgacgaccaacgccaccgcgtccaactcctccatcatcgagggcatgaagaactgctccttcaacatcacgacggagctgcgcgacaagcgcgagaagaagaacgccctgttctacaagctggacatcgtgcagctggacggcaactcctcgcagtacaggctgatcaactgcaacacctccgtcatcacgcaggcgtgccccaaggtgtccttcgaccccatccccatccactactgcgcccccgccggctacgccatcctgaagtgcaacaacaagaccttcaccggcaccggcccgtgcaacaacgtgtccaccgtgcagtgcacgcacgggatcaagcccgtggtgtccacgcagctgctcctgaacgggtcgctggccgagggcgagatcatcatccggtccgagaacatcacgaacaacgcgaagaccatcatcgtgcacctgaacgagtccgtgaagatcgagtgcacccgcccgaacaacaagacgcgcacctccatccggatcggccctggccaggccttctacgccaccggccaggtgatcggcgacatccgcgaggcgtactgcaacatcagcgagtccaagtggaacgagaccctgcagcgcgtgtccaagaagctgaaggagtacttcccccacaagaacatcaccttccagccgtcgtccggcggcgacctcgagatcaccacgcactccttcaactgcggtggcgagttcttctactgcaacacgtcgtcgctgttcaaccgcacctacatggccaactccaccgacatggccaactccaccgagaccaactccacgcgcatcatcacgatccactgccgcatcaagcagatcatcaacatgtggcaggaggtgggccgcgccatgtacgcaccgcccatcgccggcaacatcacctgcatctccaacatcaccggcctcctgctgacccgcgacggcggcaagaacacgagggacggaggcaagaacaacacggagaccttcaggccaggcggaggcaacatgaaggacaactggcgctccgagctgtacaagtacaaggtggtggaggtgaagcccctgggcgtggcacccaccaacgcccgcgagcgcgtcgtggagcgcgagaaggagtagtaagggtcctgaattcggtaaccggatcc

SEQ ID NO: 149 - DNA, 1514 bp, Artificial Sequence
  Description of Artificial Sequence: Synthetic polynucleotide
gtcgacaagaagccaccatgcgcgtgatgggcatccagcgcaactacccgcagtggtggatctggtcgatgctgggcttctggatgctcatgatctgcaacggcgtgccggtgtggaaggaggccaagacgaccctgttctgcgcgtcggacgccaaggcctacgagaaggaggtgcacaacgtgtgggcgacccacgcctgcgtgcccacggaccccaacccgcaggagatggtgctgaagaacgtgaccgagaacttcaacatgtggaagaacgacatggtggaccagatgcacgaggacgtgatctccctgtgggaccagtccctgaagccctgcgtgaagctgaccccgctgtgcgtgaccctgaactgcaccaacgcgaccaacgccaccgcgtccaactcctccatcatcgagggcatgaagaactgctccttcaacatcacgacggagctgcgcgacaagcgcgagaagaagaacgccctgttctacaagctggacatcgtgcagctggacggcaactcctcgcagtacaggctgatcaactgcaacacctccgtcatcacgcaggcgtgccccaaggtgtccttcgaccccatccccatccactactgcgcccccgccggctacgccatcctgaagtgcaacaacaagaccttcaccggcaccggcccgtgcaacaacgtgtccaccgtgcagtgcacgcacgggatcaagcccgtggtgtccacgcagctgctcctgaacgggtcgctggccgagggcgagatcatcatccggtccgagaacatcacgaacaacgacaagaccatcatcgtgcacctgaacgagtccgtgaagatcgagtgcacccgcccgagcaacaagacgcgcacctccatccggatcggccctggccaggccttctacgccaccggccaggtgatcggcgacatccgcgaggcgtactgcaacatcagcgagtccaagtggaacgagaccctgcagcgcgtgtccaagaagctgaaggagtacttcccccacaagaacatcaccttccagccgtcgtccggcggcgacctcgagatcaccacgcactccttcaactgcggtggcgagttcttctactgcaacacgtcgtcgctgttcaaccgcacctacatggccaactccaccgacatggccaactccaccgagaccaactccacgcgcaacatcacgatccactgccgcatcaagcagatcatcaacatgtggcaggaggtgggccgcgccatgtacgcaccgcccatcgccggcaacatcacctgcatctccaacatcaccggcctcctgctgacccgcgacggcggcaagaacgacacggagaccttcaggccaggcggaggcaacatgaaggacaactggcgctccgagctgtacaagtacaaggtggtggaggtgaagcccctgggcgtggcacccaccaacgcccgcgagcgcgtcgtggagcgcgagaaggagtgatagtaagaggtcccggtaaccggatcc

SEQ ID NO: 150 - DNA, 1522 bp, Artificial Sequence
  Description of Artificial Sequence: Synthetic polynucleotide
gtcgacaagaagccaccatgcgcgtgcgcggcatccagcgcagctacccgcagtggtggatctggtcgatgctgggcttctggatgctcatgatctgcaacggcgtgccggtgtggaaggaggccaagacgaccctgttctgcgcgtcggacgccaaggcctacgagaaggaggtgcacaacgtgtgggcgacccacgcctgcgtgcccacggaccccaacccgcaggagatggtgctgaagaacgtgaccgagaacttcaacatgtgggagaacgacatggtggaccagatgcacgaggacgtgatctccctgtgggaccagtccctgaagccctgcgtgaagctgaccccgctgtgcgtgaccctgaactgcatcaacgccaccaacgcgacggactcgaactccaacatcctcgaggggatgaagaactgctccttcaacatcacgacggagctgcgcgacaagcgcgagaagaagaacgccctgttctacaagctggacatcgtgcagctgggcggcaactcctcgcagtacaggctgatcaactgcaacacctccgtcatcacgcaggcgtgccccaaggtgtccttcgaccccatccccatccactactgcgcccccgccggctacgccatcctgaagtgcaacaacaagaccttcaacggcaccggcccgtgcaacaacgtgtccaccgtgcagtgcacgcacgggatcaagcccgtggtgtccacgcagctgctcctgaacgggtcgctggccgagggcgagatcatcatccggtcgaagaacatcacggacaacagcaagaccatcatcgtgcacctgaacgagtccgtgaagatcgagtgcacccgcccgagcaacaacacgcgcacctccatccggatcggccctggccaggccttctacgccaccggccaggtgatcggcaacatccgcgaggcgcactgcaacatctccgagtccaagtggaacgagaccctgcagcgcgtgtccgagaagctgaagaagtacttccccgacaagaacatcaccttccggccgtcgtccggcggcgacctcgagatcaccacgcactccttcaactgcggtggcgagttcttctactgcaacacgtcgtccctgttcaaccgcacctacatggcgacgtccaccgacatggccaactccaccgagacgaactccacgcgcatcatcacgatccactgccgcatcaagcagatcatcaacatgtggcaggaggtgggccgcgccatgtacgcaccgcccatcgccggcaacatcacctgcatctccaacatcaccggcctcctgctgacccgcgacggcggcaacaacacggaggacacggagaccttcaggccagagggaggcaacatgaaggacaactggcgctccgagctgtacaagtacaaggtggtggaggtgaagcccctgggcgtggcacccaccaacgcccgcgagcgcgtcgtggagcgcgagaaggagtagtaaggtcaccgggtcccgaattcggatcc

SEQ ID NO: 151 - protein, 486 aa, Artificial Sequence; identical to SEQ ID NO: 50
  Description of Artificial Sequence: Synthetic polypeptide

SEQ ID NO: 152 - protein, 486 aa, Artificial Sequence; identical to SEQ ID NO: 51
  Description of Artificial Sequence: Synthetic polypeptide

SEQ ID NO: 153 - protein, 486 aa, Artificial Sequence; identical to SEQ ID NO: 52
  Description of Artificial Sequence: Synthetic polypeptide

SEQ ID NO: 154 - protein, 497 aa, Artificial Sequence
  Description of Artificial Sequence: Synthetic polypeptide
MRVMGIQRNYPQWWIWSMLGFWMLMICNGVPVWKEAKTTLFCASDAKAYEKEVHNVWATHACVPTDPNPQEMVLKNVTENFNMWKNDMVDQMHEDVISLWDQSLKPCVKLTPLCVTLNCTNATTNATASNSSIIEGMKNCSFNITTELRDKREKKNALFYKLDIVQLDGNSSQYRLINCNTSVITQACPKVSFDPIPIHYCAPAGYAILKCNNKTFTGTGPCNNVSTVQCTHGIKPVVSTQLLLNGSLAEGEIIIRSENITNNAKTIIVHLNESVKIECTRPNNKTRTSIRIGPGQAFYATGQVIGDIREAYCNISESKWNETLQRVSKKLKEYFPHKNITFQPSSGGDLEITTHSFNCGGEFFYCNTSSLFNRTYMANSTDMANSTETNSTRIITIHCRIKQIINMWQEVGRAMYAPPIAGNITCISNITGLLLTRDGGKNTRDGGKNNTETFRPGGGNMKDNWRSELYKYKVVEVKPLGVAPTNARERVVEREKE

SEQ ID NO: 155 - protein, 489 aa, Artificial Sequence
  Description of Artificial Sequence: Synthetic polypeptide
MRVMGIQRNYPQWWIWSMLGFWMLMICNGVPVWKEAKTTLFCASDAKAYEKEVHNVWATHACVPTDPNPQEMVLKNVTENFNMWKNDMVDQMHEDVISLWDQSLKPCVKLTPLCVTLNCTNATNATASNSSIIEGMKNCSFNITTELRDKREKKNALFYKLDIVQLDGNSSQYRLINCNTSVITQACPKVSFDPIPIHYCAPAGYAILKCNNKTFTGTGPCNNVSTVQCTHGIKPVVSTQLLLNGSLAEGEIIIRSENITNNDKTIIVHLNESVKIECTRPSNKTRTSIRIGPGQAFYATGQVIGDIREAYCNISESKWNETLQRVSKKLKEYFPHKNITFQPSSGGDLEITTHSFNCGGEFFYCNTSSLFNRTYMANSTDMANSTETNSTRNITIHCRIKQIINMWQEVGRAMYAPPIAGNITCISNITGLLLTRDGGKNDTETFRPGGGNMKDNWRSELYKYKVVEVKPLGVAPTNARERVVEREKE

SEQ ID NO: 156 - protein, 491 aa, Artificial Sequence
  Description of Artificial Sequence: Synthetic polypeptide
MRVRGIQRSYPQWWIWSMLGFWMLMICNGVPVWKEAKTTLFCASDAKAYEKEVHNVWATHACVPTDPNPQEMVLKNVTENFNMWENDMVDQMHEDVISLWDQSLKPCVKLTPLCVTLNCINATNATDSNSNILEGMKNCSFNITTELRDKREKKNALFYKLDIVQLGGNSSQYRLINCNTSVITQACPKVSFDPIPIHYCAPAGYAILKCNNKTFNGTGPCNNVSTVQCTHGIKPVVSTQLLLNGSLAEGEIIIRSKNITDNSKTIIVHLNESVKIECTRPSNNTRTSIRIGPGQAFYATGQVIGNIREAHCNISESKWNETLQRVSEKLKKYFPDKNITFRPSSGGDLEITTHSFNCGGEFFYCNTSSLFNRTYMATSTDMANSTETNSTRIITIHCRIKQIINMWQEVGRAMYAPPIAGNITCISNITGLLLTRDGGNNTEDTETFRPEGGNMKDNWRSELYKYKVVEVKPLGVAPTNARERVVEREKE

SEQ ID NO: 157 - DNA, 2582 bp, Artificial Sequence
  Description of Artificial Sequence: Synthetic polynucleotide
ggtcgacaagaaatgcgcgtgatgggcatccagcgcaactacccgcagtggtggatctggtcgatgctgggcttctggatgctcatgatctgcaacggcatgtgggtgacggtgtactacggcgtgccggtgtggaaggaggccaagacgaccctgttctgcgcgtcggacgccaaggcctacgagaaggaggtgcacaacgtgtgggcgacccacgcctgcgtgcccacggaccccaacccgcaggagatggtgctgaagaacgtgaccgagaacttcaacatgtggaagaacgacatggtggaccagatgcacgaggacgtgatctccctgtgggaccagtccctgaagccctgcgtgaagctgaccccgctgtgcgtgaccctgaactgcaccaacgccaccgcgtccaactcctccatcatcgagggcatgaagaactgctccttcaacatcacgacggagctgcgcgacaagcgcgagaagaagaacgccctgttctacaagctggacatcgtgcagctggacggcaactcctcgcagtacaggctgatcaactgcaacacctccgtcatcacgcaggcgtgccccaaggtgtccttcgaccccatccccatccactactgcgcccccgccggctacgccatcctgaagtgcaacaacaagaccttcaccggcaccggcccgtgcaacaacgtgtccaccgtgcagtgcacgcacgggatcaagcccgtggtgtccacgcagctgctcctgaacgggtcgctggccgagggcgagatcatcatccggtccgagaacatcacgaagaacgtgaagaccatcatcgtgcacctgaacgagtccgtgaagatcgagtgcacccgcccgaacaacaagacgcgcacctccatccggatcggccctggccaggccttctacgccaccggccaggtgatcggcgacatccgcgaggcgtactgcaacatcaacgagtccaagtggaacgagaccctgcagcgcgtgtccaagaagctgaaggagtacttcccccacaagaacatcaccttccagccgtcgtccggcggcgacctcgagatcaccacgcactccttcaactgcggtggcgagttcttctactgcaacacgtcgtcgctgttcaaccgcacctacatggccaactccaccgacatggccaactccaccgagaccaactccacgcgcaccatcacgatccactgccgcatcaagcagatcatcaacatgtggcaggaggtgggccgcgccatgtacgcaccgcccatcgccggcaacatcacctgcatctccaacatcaccggcctcctgctgacccgcgacggcggcaagaacaacacggagaccttcaggccaggcggaggcaacatgaaggacaactggcgctccgagctgtacaagtacaaggtggtggaggtgaagcccctgggcgtggcacccaccaacgcccgcaggcgcgtcgtggagcgcgagaagcgcgccgtgggcatgggcgccgtgttcctgggcttcctgggcgctgcgggctccaccatgggtgccgcgtccatcaccctgaccgtgcaggcccgccagctgctctccggcatcgtgcagcagcagtccaacctcctgaaggccatcgaggcccagcagcacatgctgaagctgaccgtgtggggcatcaagcagctgcaggccagggtgctcgcgctcgagcgctacctgaaggaccagcagctgctcggcatgtggggctgctccggcaagctgatctgcaccaccaacgtgtactggaactcgtcctggtccaacaagacctacggcgacatctgggacaacatgacctggatgcagtgggagcgcgagatctccaactacaccgagatcatctacgagctcctcgaggagtcccagaaccagcaggagaagaacgagcaggatctgctcgcgctggaccgctggaactccctgtggaactggttcaacatcaccaactggctgtggtacatcaagatcttcatcatgatcgtgggcggcctgatcggcctgcgcatcatcttcgccgtgctgtcgctggtgaaccgcgtgcgccagggctactccccgctgtccctgcaaacgctgatcccctccccccggggcccggacaggcccggtggcatcgaggaggagggcggcgagcaggaccgcaaccgctccacgcgcctggtgtccggcttcctggccctggtgtgggacgacctgcgctccctgtgcctgttcatctaccaccgcctgcgcgacttcatcctgatcgcggcccgcgctggcgagctgctgggccggtcctcgctgaagggcctgcgccgcggctgggaggccctgaagtacctgggctcgctggtgcagtactggggcctggagctgaagcgctccgccatctccctgctggacaccctggccatcgccgtgggcgagggcaccgaccgcatcctggagttcgtgctgggcatctgccgcgccatccgcaacatccccacccgcatccgccagggcttcgagaccgccctcctgtagtaaggtgaccgaattcgggacccggatcc

SEQ ID NO: 158 - DNA, 2582 bp, Artificial Sequence
  Description of Artificial Sequence: Synthetic polynucleotide
ggtcgacaagaaatgcgcgtgatgggcatccagcgcaactacccgcagtggtggatctggtcgatgctgggcttctggatgctcatgatctgcaacggcatgtgggtgacggtgtactacggcgtgccggtgtggaaggaggccaagacgaccctgttctgcgcgtcggacgccaaggcctacgagaaggaggtgcacaacgtgtgggcgacccacgcctgcgtgcccacggaccccaacccgcaggagatggtgctgaagaacgtgaccgagaacttcaacatgtggaagaacgacatggtggaccagatgcacgaggacgtgatctccctgtgggaccagtccctgaagccctgcgtgaagctgaccccgctgtgcgtgaccctgaactgcaccaacgccaccgcgtccaactcctccatcatcgagggcatgaagaactgctccttcaacatcacgacggagctgcgcgacaagcgcgagaagaagaacgccctgttctacaagctggacatcgtgcagctggacggcaactcctcgcagtacaggctgatcaactgcaacacctccgtcatcacgcaggcgtgccccaaggtgtccttcgaccccatccccatccactactgcgcccccgccggctacgccatcctgaagtgcaacaacaagaccttcaccggcaccggcccgtgcaacaacgtgtccaccgtgcagtgcacgcacgggatcaagcccgtggtgtccacgcagctgctcctgaacgggtcgctggccgagggcgagatcatcatccggtccgagaacatcacggacaacgggaagaccatcatcgtgcacctgaacgagtccgtgaagatcgagtgcacccgcccgaacaacaagacgcgcacctccatccggatcggccctggccaggccttctacgccaccggccaggtgatcggcgacatccgcgaggcgtactgcaacatcaacgagtccaagtggaacgagaccctgcagcgcgtgtccaagaagctgaaggagtacttcccccacaagaacatcaccttccagccgtcgtccggcggcgacctcgagatcaccacgcactccttcaactgcggtggcgagttcttctactgcaacacgtcgtcgctgttcaaccgcacctacatggccaactccaccgacatggccaactccaccgagaccaactccacgcgcaccatcacgatccactgccgcatcaagcagatcatcaacatgtggcaggaggtgggccgcgccatgtacgcaccgcccatcgccggcaacatcacctgcatctccaacatcaccggcctcctgctgacccgcgacggcggcaagaacaacacggagaccttcaggccaggcggaggcaacatgaaggacaactggcgctccgagctgtacaagtacaaggtggtggaggtgaagcccctgggcgtggcacccaccaacgcccgcaggcgcgtcgtggagcgcgagaagcgcgccgtgggcatgggcgccgtgttcctgggcttcctgggcgctgcgggctccaccatgggtgccgcgtccatcaccctgaccgtgcaggcccgccagctgctctccggcatcgtgcagcagcagtccaacctcctgaaggccatcgaggcccagcagcacatgctgaagctgaccgtgtggggcatcaagcagctgcaggccagggtgctcgcgctcgagcgctacctgaaggaccagcagctgctcggcatgtggggctgctccggcaagctgatctgcaccaccaacgtgtactggaactcgtcctggtccaacaagacctacggcgacatctgggacaacatgacctggatgcagtgggagcgcgagatctccaactacaccgagatcatctacgagctcctcgaggagtcccagaaccagcaggagaagaacgagcaggatctgctcgcgctggaccgctggaactccctgtggaactggttcaacatcaccaactggctgtggtacatcaagatcttcatcatgatcgtgggcggcctgatcggcctgcgcatcatcttcgccgtgctgtcgctggtgaaccgcgtgcgccagggctactccccgctgtccctgcaaacgctgatcccctccccccggggcccggacaggcccggtggcatcgaggaggagggcggcgagcaggaccgcaaccgctccacgcgcctggtgtccggcttcctggccctggtgtgggacgacctgcgctccctgtgcctgttcatctaccaccgcctgcgcgacttcatcctgatcgcggcccgcgctggcgagctgctgggccggtcctcgctgaagggcctgcgccgcggctgggaggccctgaagtacctgggctcgctggtgcagtactggggcctggagctgaagcgctccgccatctccctgctggacaccctggccatcgccgtgggcgagggcaccgaccgcatcctggagttcgtgctgggcatctgccgcgccatccgcaacatccccacccgcatccgccagggcttcgagaccgccctcctgtagtaaggtgaccgaattcaggtcccggatcc

SEQ ID NO: 159 - DNA, 2582 bp, Artificial Sequence
  Description of Artificial Sequence: Synthetic polynucleotide
ggtcgacaagaaatgcgcgtgatgggcatccagcgcaactacccgcagtggtggatctggtcgatgctgggcttctggatgctcatgatctgcaacggcatgtgggtgacggtgtactacggcgtgccggtgtggaaggaggccaagacgaccctgttctgcgcgtcggacgccaaggcctacgagaaggaggtgcacaacgtgtgggcgacccacgcctgcgtgcccacggaccccaacccgcaggagatggtgctgaagaacgtgaccgagaacttcaacatgtggaagaacgacatggtggaccagatgcacgaggacgtgatctccctgtgggaccagtccctgaagccctgcgtgaagctgaccccgctgtgcgtgaccctgaactgcaccaacgccaccgcgtccaacaactccatcatcgagggcatgaagaactgctccttcaacatcacgacggagctgcgcgacaagcgcgagaagaagaacgccctgttctacaagctggacatcgtgcagctggacggcaactcctcgcagtacaggctgatcaactgcaacacctccgtcatcacgcaggcgtgccccaaggtgtccttcgaccccatccccatccactactgcgcccccgccggctacgccatcctgaagtgcaacaacaagaccttcaccggcaccggcccgtgcaacaacgtgtccaccgtgcagtgcacgcacgggatcaagcccgtggtgtccacgcagctgctcctgaacgggtcgctggccgagggcgagatcatcatccggtccgagaacatcacgaacaacgcgaagaccatcatcgtgcacctgaacgagtccgtgaagatcgagtgcacccgcccgaacaacaagacgcgcacgtccatccggatcggccctggccaggccttctacgccaccggccaggtgatcggcgacatccgcaaggcgtactgcaacatctcggagtccaagtggaacgagaccctgcagcgcgtgtccaagaagctgaaggagtacttcccccacaagaacatcaccttccagccgtcgtccggcggcgacctcgagatcaccacgcactccttcaactgcggtggcgagttcttctactgcaacacgtcgtcgctgttcaaccgcacctacatggccaactccaccgacatggccaactccaccgagaccaactccacgcgcaccatcacgctccactgccgcatcaagcagatcatcaacatgtggcaggaggtgggccgcgccatgtacgcaccgcccatcgccggcaacatcacctgcatctccaacatcaccggcctcctgctgacccgcgacggcggcaagaacaacacggagaccttcaggccaggcggaggcaacatgaaggacaactggcgctccgagctgtacaagtacaaggtggtggaggtgaagcccctgggcgtggcacccaccaacgcccgcaggcgcgtcgtggagcgcgagaagcgcgccgtgggcatgggcgccgtgttcctgggcttcctgggcgctgcgggctccaccatgggtgccgcgtccatcaccctgaccgtgcaggcccgccagctgctctccggcatcgtgcagcagcagtccaacctcctgaaggccatcgaggcccagcagcacatgctgaagctgaccgtgtggggcatcaagcagctgcaggccagggtgctcgcgctcgagcgctacctgaaggaccagcagctgctcggcatgtggggctgctccggcaagctgatctgcaccaccaacgtgtactggaactcgtcctggtccaacaagacctacggcgacatctgggacaacatgacctggatgcagtgggagcgcgagatctccaactacaccgagatcatctacgagctcctcgaggagtcccagaaccagcaggagaagaacgagcaggatctgctcgcgctggaccgctggaactccctgtggaactggttcaacatcaccaactggctgtggtacatcaagatcttcatcatgatcgtgggcggcctgatcggcctgcgcatcatcttcgccgtgctgtcgctggtgaaccgcgtgcgccagggctactccccgctgtccctgcaaacgctgatcccctccccccggggcccggacaggcccggtggcatcgaggaggagggcggcgagcaggaccgcaaccgctccacgcgcctggtgtccggcttcctggccctggtgtgggacgacctgcgctccctgtgcctgttcatctaccaccgcctgcgcgacttcatcctgatcgcggcccgcgctggcgagctgctgggccggtcctcgctgaagggcctgcgccgcggctgggaggccctgaagtacctgggctcgctggtgcagtactggggcctggagctgaagcgctccgccatctccctgctggacaccctggccatcgccgtgggcgagggcaccgaccgcatcctggagttcgtgctgggcatctgccgcgccatccgcaacatccccacccgcatccgccagggcttcgagaccgccctcctgtagtaagggacccgaattcggtcaccggatcc

SEQ ID NO: 160 - DNA, 2615 bp, Artificial Sequence
  Description of Artificial Sequence: Synthetic polynucleotide
ggtcgacaagaaatgcgcgtgatgggcatccagcgcaactacccgcagtggtggatctggtcgatgctgggcttctggatgctcatgatctgcaacggcatgtgggtgacggtgtactacggcgtgccggtgtggaaggaggccaagacgaccctgttctgcgcgtcggacgccaaggcctacgagaaggaggtgcacaacgtgtgggcgacccacgcctgcgtgcccacggaccccaacccgcaggagatggtgctgaagaacgtgaccgagaacttcaacatgtggaagaacgacatggtggaccagatgcacgaggacgtgatctccctgtgggaccagtccctgaagccctgcgtgaagctgaccccgctgtgcgtgaccctgaactgcaccaacgcgacgaccaacgccaccgcgtccaactcctccatcatcgagggcatgaagaactgctccttcaacatcacgacggagctgcgcgacaagcgcgagaagaagaacgccctgttctacaagctggacatcgtgcagctggacggcaactcctcgcagtacaggctgatcaactgcaacacctccgtcatcacgcaggcgtgccccaaggtgtccttcgaccccatccccatccactactgcgcccccgccggctacgccatcctgaagtgcaacaacaagaccttcaccggcaccggcccgtgcaacaacgtgtccaccgtgcagtgcacgcacgggatcaagcccgtggtgtccacgcagctgctcctgaacgggtcgctggccgagggcgagatcatcatccggtccgagaacatcacgaacaacgcgaagaccatcatcgtgcacctgaacgagtccgtgaagatcgagtgcacccgcccgaacaacaagacgcgcacctccatccggatcggccctggccaggccttctacgccaccggccaggtgatcggcgacatccgcgaggcgtactgcaacatcagcgagtccaagtggaacgagaccctgcagcgcgtgtccaagaagctgaaggagtacttcccccacaagaacatcaccttccagccgtcgtccggcggcgacctcgagatcaccacgcactccttcaactgcggtggcgagttcttctactgcaacacgtcgtcgctgttcaaccgcacctacatggccaactccaccgacatggccaactccaccgagaccaactccacgcgcatcatcacgatccactgccgcatcaagcagatcatcaacatgtggcaggaggtgggccgcgccatgtacgcaccgcccatcgccggcaacatcacctgcatctccaacatcaccggcctcctgctgacccgcgacggcggcaagaacacgagggacggaggcaagaacaacacggagaccttcaggccaggcggaggcaacatgaaggacaactggcgctccgagctgtacaagtacaaggtggtggaggtgaagcccctgggcgtggcacccaccaacgcccgcaggcgcgtcgtggagcgcgagaagcgcgccgtgggcatgggcgccgtgttcctgggcttcctgggcgctgcgggctccaccatgggtgccgcgtccatcaccctgaccgtgcaggcccgccagctgctctccggcatcgtgcagcagcagtccaacctcctgaaggccatcgaggcccagcagcacatgctgaagctgaccgtgtggggcatcaagcagctgcaggccagggtgctcgcgctcgagcgctacctgaaggaccagcagctgctcggcatgtggggctgctccggcaagctgatctgcaccaccaacgtgtactggaactcgtcctggtccaacaagacctacggcgacatctgggacaacatgacctggatgcagtgggagcgcgagatctccaactacaccgagatcatctacgagctcctcgaggagtcccagaaccagcaggagaagaacgagcaggatctgctcgcgctggaccgctggaactccctgtggaactggttcaacatcaccaactggctgtggtacatcaagatcttcatcatgatcgtgggcggcctgatcggcctgcgcatcatcttcgccgtgctgtcgctggtgaaccgcgtgcgccagggctactccccgctgtccctgcaaacgctgatcccctccccccggggcccggacaggcccggtggcatcgaggaggagggcggcgagcaggaccgcaaccgctccacgcgcctggtgtccggcttcctggccctggcgtgggacgacctgcgctccctgtgcctgttcatctaccaccgcctgcgcgacttcatcctgatcgcggcccgcgctggcgagctgctgggccggtcctcgctgaagggcctgcgccgcggctgggaggccctgaagtacctgggctcgctggtgcagtactggggcctggagctgaagcgctccgccatctccctgctggacaccctggccatcgccgtgggcgagggcaccgaccgcatcctggagttcgtgctgggcatctgccgcgccatccgcaacatccccacccgcatccgccagggcttcgagaccgccctcctgtagtaagggtcctgaattcggtaaccggatcc

SEQ ID NO: 161 - DNA, 2592 bp, Artificial Sequence
  Description of Artificial Sequence: Synthetic polynucleotide
ggtcgacaagaagccaccatgcgcgtgatgggcatccagcgcaactacccgcagtggtggatctggtcgatgctgggcttctggatgctcatgatctgcaacggcatgtgggtgacggtgtactacggcgtgccggtgtggaaggaggccaagacgaccctgttctgcgcgtcggacgccaaggcctacgagaaggaggtgcacaacgtgtgggcgacccacgcctgcgtgcccacggaccccaacccgcaggagatggtgctgaagaacgtgaccgagaacttcaacatgtggaagaacgacatggtggaccagatgcacgaggacgtgatctccctgtgggaccagtccctgaagccctgcgtgaagctgaccccgctgtgcgtgaccctgaactgcaccaacgcgaccaacgccaccgcgtccaactcctccatcatcgagggcatgaagaactgctccttcaacatcacgacggagctgcgcgacaagcgcgagaagaagaacgccctgttctacaagctggacatcgtgcagctggacggcaactcctcgcagtacaggctgatcaactgcaacacctccgtcatcacgcaggcgtgccccaaggtgtccttcgaccccatccccatccactactgcgcccccgccggctacgccatcctgaagtgcaacaacaagaccttcaccggcaccggcccgtgcaacaacgtgtccaccgtgcagtgcacgcacgggatcaagcccgtggtgtccacgcagctgctcctgaacgggtcgctggccgagggcgagatcatcatccggtccgagaacatcacgaacaacgacaagaccatcatcgtgcacctgaacgagtccgtgaagatcgagtgcacccgcccgagcaacaagacgcgcacctccatccggatcggccctggccaggccttctacgccaccggccaggtgatcggcgacatccgcgaggcgtactgcaacatcagcgagtccaagtggaacgagaccctgcagcgcgtgtccaagaagctgaaggagtacttcccccacaagaacatcaccttccagccgtcgtccggcggcgacctcgagatcaccacgcactccttcaactgcggtggcgagttcttctactgcaacacgtcgtcgctgttcaaccgcacctacatggccaactccaccgacatggccaactccaccgagaccaactccacgcgcaacatcacgatccactgccgcatcaagcagatcatcaacatgtggcaggaggtgggccgcgccatgtacgcaccgcccatcgccggcaacatcacctgcatctccaacatcaccggcctcctgctgacccgcgacggcggcaagaacgacacggagaccttcaggccaggcggaggcaacatgaaggacaactggcgctccgagctgtacaagtacaaggtggtggaggtgaagcccctgggcgtggcacccaccaacgcccgcaggcgcgtcgtggagcgcgagaagcgcgccgtgggcatgggcgccgtgttcctgggcttcctgggcgctgcgggctccaccatgggtgccgcgtccatcaccctgaccgtgcaggcccgccagctgctctccggcatcgtgcagcagcagtccaacctcctgaaggccatcgaggcccagcagcacatgctgaagctgaccgtgtggggcatcaagcagctgcaggccagggtgctcgcgctcgagcgctacctgaaggaccagcagctgctcggcatgtggggctgctccggcaagctgatctgcaccaccaacgtgtactggaactcgtcctggtccaacaagacctacggcgacatctgggacaacatgacctggatgcagtgggagcgcgagatctccaactacaccgagatcatctacgagctcctcgaggagtcccagaaccagcaggagaagaacgagcaggatctgctcgcgctggaccgctggaactccctgtggaactggttcaacatcaccaactggctgtggtacatcaagatcttcatcatgatcgtgggcggcctgatcggcctgcgcatcatcttcgccgtgctgtcgctggtgaaccgcgtgcgccagggctactccccgctgtccctgcaaacgctgatcccctccccccggggcccggacaggcccggtggcatcgaggaggagggcggcgagcaggaccgcaaccgctccacgcgcctggtgtccggcttcctggccctggtgtgggacgacctgcgctccctgtgcctgttcatctaccaccgcctgcgcgacttcatcctgatcgcggcccgcgctggcgagctgctgggccggtcctcgctgaagggcctgcgccgcggctgggaggccctgaagtacctgggctcgctggtgcagtactggggcctggagctgaagcgctccgccatctccctgctggacaccctggccatcgccgtgggcgagggcaccgaccgcatcctggagttcgtgctgggcatctgccgcgccatccgcaacatccccacccgcatccgccagggcttcgagaccgccctcctgtgatgagaggtcccggtaaccggatcc

SEQ ID NO: 162 - DNA, 2597 bp, Artificial Sequence
  Description of Artificial Sequence: Synthetic polynucleotide
ggtcgacaagaaatgcgcgtgcgcggcatccagcgcagctacccgcagtggtggatctggtcgatgctgggcttctggatgctcatgatctgcaacggcatgtgggtgacggtgtactacggcgtgccggtgtggaaggaggccaagacgaccctgttctgcgcgtcggacgccaaggcctacgagaaggaggtgcacaacgtgtgggcgacccacgcctgcgtgcccacggaccccaacccgcaggagatggtgctgaagaacgtgaccgagaacttcaacatgtgggagaacgacatggtggaccagatgcacgaggacgtgatctccctgtgggaccagtccctgaagccctgcgtgaagctgaccccgctgtgcgtgaccctgaactgcatcaacgccaccaacgcgacggactcgaactccaacatcctcgaggggatgaagaactgctccttcaacatcacgacggagctgcgcgacaagcgcgagaagaagaacgccctgttctacaagctggacatcgtgcagctgggcggcaactcctcgcagtacaggctgatcaactgcaacacctccgtcatcacgcaggcgtgccccaaggtgtccttcgaccccatccccatccactactgcgcccccgccggctacgccatcctgaagtgcaacaacaagaccttcaacggcaccggcccgtgcaacaacgtgtccaccgtgcagtgcacgcacgggatcaagcccgtggtgtccacgcagctgctcctgaacgggtcgctggccgagggcgagatcatcatccggtcgaagaacatcacggacaacagcaagaccatcatcgtgcacctgaacgagtccgtgaagatcgagtgcacccgcccgagcaacaacacgcgcacctccatccggatcggccctggccaggccttctacgccaccggccaggtgatcggcaacatccgcgaggcgcactgcaacatctccgagtccaagtggaacgagaccctgcagcgcgtgtccgagaagctgaagaagtacttccccgacaagaacatcaccttccggccgtcgtccggcggcgacctcgagatcaccacgcactccttcaactgcggtggcgagttcttctactgcaacacgtcgtccctgttcaaccgcacctacatggcgacgtccaccgacatggccaactccaccgagacgaactccacgcgcatcatcacgatccactgccgcatcaagcagatcatcaacatgtggcaggaggtgggccgcgccatgtacgcaccgcccatcgccggcaacatcacctgcatctccaacatcaccggcctcctgctgacccgcgacggcggcaacaacacggaggacacggagaccttcaggccagagggaggcaacatgaaggacaactggcgctccgagctgtacaagtacaaggtggtggaggtgaagcccctgggcgtggcacccaccaacgcccgcaggcgcgtcgtggagcgcgagaagcgcgccgtgggcatgggcgccgtgttcctgggcttcctgggcgctgcgggctccaccatgggtgccgcgtccatcaccctgaccgtgcaggcccgccagctgctctccggcatcgtgcagcagcagtccaacctcctgaaggccatcgaggcccagcagcacatgctgaagctgaccgtgtggggcatcaagcagctgcaggccagggtgctcgcgctcgagcgctacctgaaggaccagcagctgctcggcatgtggggctgctccggcaagctgatctgcaccaccaacgtgtactggaactcgtcctggtccaacaagacctacgacgacatctgggacaacatgacctggatgcagtgggagcgcgagatctccaactacaccaacatcatctacgagctcctcgaggagtcccagaaccagcaggagaagaacgagcaggatctgctcgcgctggaccgctggaactccctgtggaactggttcaacatcaccaactggctgtggtacatcaagatcttcatcatgatcgtgggcggcctgatcggcctgcgcatcatcttcgccgtgctgtcgctggtgaaccgcgtgcgccagggctactccccgctgtccctgcaaacgctgatcccctccccccggggcccggacaggcccggtggcatcgaggaggagggcggcgagcaggaccgcaaccgctccacgcgcctggtgtccggcttcctggccctggcgtgggacgacctgcgctccctgtgcctgttcatctaccaccgcctgcgcgacttcatcctgatcgcggcccgcgctggcgagctgctgggccggtcctcgctgaagggcctgcgccgcggctgggaggccctgaagtacctgggctcgctggtgcagtactggggcctggagctgaagcgctccgccatctccctgctggacaccctggccatcgccgtgggcgagggcaccgaccgcatcctggagttcgtgctgggcatctgccgcgccatccgcaacatccccacccgcatccgccagggcttcgagaccgccctcctgtagtaaggtcaccgggtcccgaattcggatcc

SEQ ID NO: 163 - protein, 846 aa, Artificial Sequence; identical to SEQ ID NO: 62
  Description of Artificial Sequence: Synthetic polypeptide

SEQ ID NO: 164 - protein, 846 aa, Artificial Sequence; identical to SEQ ID NO: 63
  Description of Artificial Sequence: Synthetic polypeptide

SEQ ID NO: 165 - protein, 846 aa, Artificial Sequence; identical to SEQ ID NO: 64
  Description of Artificial Sequence: Synthetic polypeptide

SEQ ID NO: 166 - protein, 857 aa, Artificial Sequence
  Description of Artificial Sequence: Synthetic polypeptide
MRVMGIQRNYPQWWIWSMLGFWMLMICNGMWVTVYYGVPVWKEAKTTLFCASDAKAYEKEVHNVWATHACVPTDPNPQEMVLKNVTENFNMWKNDMVDQMHEDVISLWDQSLKPCVKLTPLCVTLNCTNATTNATASNSSIIEGMKNCSFNITTELRDKREKKNALFYKLDIVQLDGNSSQYRLINCNTSVITQACPKVSFDPIPIHYCAPAGYAILKCNNKTFTGTGPCNNVSTVQCTHGIKPVVSTQLLLNGSLAEGEIIIRSENITNNAKTIIVHLNESVKIECTRPNNKTRTSIRIGPGQAFYATGQVIGDIREAYCNISESKWNETLQRVSKKLKEYFPHKNITFQPSSGGDLEITTHSFNCGGEFFYCNTSSLFNRTYMANSTDMANSTETNSTRIITIHCRIKQIINMWQEVGRAMYAPPIAGNITCISNITGLLLTRDGGKNTRDGGKNNTETFRPGGGNMKDNWRSELYKYKVVEVKPLGVAPTNARRRVVEREKRAVGMGAVFLGFLGAAGSTMGAASITLTVQARQLLSGIVQQQSNLLKAIEAQQHMLKLTVWGIKQLQARVLALERYLKDQQLLGMWGCSGKLICTTNVYWNSSWSNKTYGDIWDNMTWMQWEREISNYTEIIYELLEESQNQQEKNEQDLLALDRWNSLWNWFNITNWLWYIKIFIMIVGGLIGLRIIFAVLSLVNRVRQGYSPLSLQTLIPSPRGPDRPGGIEEEGGEQDRNRSTRLVSGFLALAWDDLRSLCLFIYHRLRDFILIAARAGELLGRSSLKGLRRGWEALKYLGSLVQYWGLELKRSAISLLDTLAIAVGEGTDRILEFVLGICRAIRNIPTRIRQGFETALL

SEQ ID NO: 167 - protein, 849 aa, Artificial Sequence
  Description of Artificial Sequence: Synthetic polypeptide
MRVMGIQRNYPQWWIWSMLGFWMLMICNGMWVTVYYGVPVWKEAKTTLFCASDAKAYEKEVHNVWATHACVPTDPNPQEMVLKNVTENFNMWKNDMVDQMHEDVISLWDQSLKPCVKLTPLCVTLNCTNATNATASNSSIIEGMKNCSFNITTELRDKREKKNALFYKLDIVQLDGNSSQYRLINCNTSVITQACPKVSFDPIPIHYCAPAGYAILKCNNKTFTGTGPCNNVSTVQCTHGIKPVVSTQLLLNGSLAEGEIIIRSENITNNDKTIIVHLNESVKIECTRPSNKTRTSIRIGPGQAFYATGQVIGDIREAYCNISESKWNETLQRVSKKLKEYFPHKNITFQPSSGGDLEITTHSFNCGGEFFYCNTSSLFNRTYMANSTDMANSTETNSTRNITIHCRIKQIINMWQEVGRAMYAPPIAGNITCISNITGLLLTRDGGKNDTETFRPGGGNMKDNWRSELYKYKVVEVKPLGVAPTNARRRVVEREKRAVGMGAVFLGFLGAAGSTMGAASITLTVQARQLLSGIVQQQSNLLKAIEAQQHMLKLTVWGIKQLQARVLALERYLKDQQLLGMWGCSGKLICTTNVYWNSSWSNKTYGDIWDNMTWMQWEREISNYTEIIYELLEESQNQQEKNEQDLLALDRWNSLWNWFNITNWLWYIKIFIMIVGGLIGLRIIFAVLSLVNRVRQGYSPLSLQTLIPSPRGPDRPGGIEEEGGEQDRNRSTRLVSGFLALVWDDLRSLCLFIYHRLRDFILIAARAGELLGRSSLKGLRRGWEALKYLGSLVQYWGLELKRSAISLLDTLAIAVGEGTDRILEFILGICRAIRNIPTRIRQGFETALL

SEQ ID NO: 168 - protein, 851 aa, Artificial Sequence
  Description of Artificial Sequence: Synthetic polypeptide
MRVRGIQRSYPQWWIWSMLGFWMLMICNGMWVTVYYGVPVWKEAKTTLFCASDAKAYEKEVHNVWATHACVPTDPNPQEMVLKNVTENFNMWENDMVDQMHEDVISLWDQSLKPCVKLTPLCVTLNCINATNATDSNSNILEGMKNCSFNITTELRDKREKKNALFYKLDIVQLGGNSSQYRLINCNTSVITQACPKVSFDPIPIHYCAPAGYAILKCNNKTFNGTGPCNNVSTVQCTHGIKPVVSTQLLLNGSLAEGEIIIRSKNITDNSKTIIVHLNESVKIECTRPSNNTRTSIRIGPGQAFYATGQVIGNIREAHCNISESKWNETLQRVSEKLKKYFPDKNITFRPSSGGDLEITTHSFNCGGEFFYCNTSSLFNRTYMATSTDMANSTETNSTRIITIHCRIKQIINMWQEVGRAMYAPPIAGNITCISNITGLLLTRDGGNNTEDTETFRPEGGNMKDNWRSELYKYKVVEVKPLGVAPTNARRRVVEREKRAVGMGAVFLGFLGAAGSTMGAASITLTVQARQLLSGIVQQQSNLLKAIEAQQHMLKLTVWGIKQLQARVLALERYLKDQQLLGMWGCSGKLICTTNVYWNSSWSNKTYDDIWDNMTWMQWEREISNYTNIIYELLEESQNQQEKNEQDLLALDRWNSLWNWFNITNWLWYIKIFIMIVGGLIGLRIIFAVLSLVNRVRQGYSPLSLQTLIPSPRGPDRPGGIEEEGGEQDRNRSTRLVSGFLALAWDDLRSLCLFIYHRLRDFILIAARAGELLGRSSLKGLRRGWEALKYLGSLVQYWGLELKRSAISLLDTLAIAVGEGTDRILEFVLGICRAIRNIPTRIRQGFETALL

SEQ ID NO: 169 - DNA, 1509 bp, Artificial Sequence; identical to SEQ ID NO: 145
  Description of Artificial Sequence: Synthetic polynucleotide

SEQ ID NO: 170 - DNA, 1509 bp, Artificial Sequence; identical to SEQ ID NO: 146
  Description of Artificial Sequence: Synthetic polynucleotide

SEQ ID NO: 171 - DNA, 1509 bp, Artificial Sequence; identical to SEQ ID NO: 147
  Description of Artificial Sequence: Synthetic polynucleotide

SEQ ID NO: 172 - DNA, 1542 bp, Artificial Sequence; identical to SEQ ID NO: 148
  Description of Artificial Sequence: Synthetic polynucleotide

SEQ ID NO: 173 - DNA, 1514 bp, Artificial Sequence; identical to SEQ ID NO: 149
  Description of Artificial Sequence: Synthetic polynucleotide

SEQ ID NO: 174 - DNA, 1544 bp, Artificial Sequence
  Description of Artificial Sequence: Synthetic polynucleotide
ggtcgacaagaagccaccatgcgcgtgatgggccggcagcgcaactacccgcagtggtggatctggtcgatgctgggcctctggatgctcatgatctgcaacggcgtgccggtgtggaaggaggccaagacgaccctgttctgcgcgtcggacgccaaggcctacgagaaggaggtgcacaacgtgtgggcgacccacgcctgcgtgcccacggaccccaacccgcaggagatggtgctgaagaacgtgaccgagaacttcaacatgtggaagaacgacatggtggaccagatgcacgaggacgtgatctccctgtgggaccagtccctgacgccctgcgtgaagctgaccccgctgtgcgtgaccctgaactgcacggacgccaacgacaccgcgtcgaacagctccatcatcaaggggatgaacaactccatcgtgggggagatgaagaactgctccttcaacatcacgacggagctgcgcgacaagcgcgagaagaagaacgccctgttctacaagctggacatcgtgcagctggacggcaactcctcggagtacaggctgatcaactgcaacacctccgtcatcacgcaggcgtgccccaaggtgtccttcgaccccatccccatccactactgcgcccccgccggctacgccatcctgaagtgcaacaacaagaccttcaacggcaccggcccgtgcaacaacgtgtccaccgtgcagtgcacgcacgggatcaagcccgtggtgtccacgcagctgctcctgaacgggtcgctggccgagggcgagatcatcatccggtcggagaacatcacggacaacgcgaagaccatcatcgtgcacctgaacgagtccgtgaagatcgagtgcacccgcccgagcaacaacacgcgcacctccatccggatcggccctggccaggccttctacgccaccggccaggtgatcggcgacatccgcaaggcgcactgcaacatctccgagtccaagtggaacgagaccctgcagcgcgtgtccaagaagctgaaggagtacttccccgacaagaacatcaccttccagccgtcgtccggcggcgaccccgagatcaccacgcactccttcaactgcggtggcgagttcttctactgcaacacgtcgtccctgttcaaccgcacctacatggccaactcgacggacatggcgaactccgcggagaccaactccacgcgcaccatcacgctccactgccgcatcaagcagatcatcaacatgtggcaggaggtgggccgcgccatgtacgcaccgcccatcgccggcaacatcacctgcatctccaacatcaccggcctcctgctgacccgcgacggaggcaactccagcacggagacggagaccttcaggccagggggaggcaacatgaaggacaactggcgctccgagctgtacaagtacaaggtggtggaggtgaagcccctgggcgtggcacccaccaacgcccgcgagcgcgtggtggagcgcgagaaggagtagtaaggtcaccgggacctgaattcggatcc

SEQ ID NO: 175 - protein, 486 aa, Artificial Sequence; identical to SEQ ID NO: 50
  Description of Artificial Sequence: Synthetic polypeptide

SEQ ID NO: 176 - protein, 486 aa, Artificial Sequence; identical to SEQ ID NO: 51
  Description of Artificial Sequence: Synthetic polypeptide

SEQ ID NO: 177 - protein, 486 aa, Artificial Sequence; identical to SEQ ID NO: 52
  Description of Artificial Sequence: Synthetic polypeptide

SEQ ID NO: 178 - protein, 497 aa, Artificial Sequence; identical to SEQ ID NO: 154
  Description of Artificial Sequence: Synthetic polypeptide

SEQ ID NO: 179 - protein, 489 aa, Artificial Sequence; identical to SEQ ID NO: 155
  Description of Artificial Sequence: Synthetic polypeptide

SEQ ID NO: 180 - protein, 498 aa, Artificial Sequence
  Description of Artificial Sequence: Synthetic polypeptide
MRVMGRQRNYPQWWIWSMLGLWMLMICNGVPVWKEAKTTLFCASDAKAYEKEVHNVWATHACVPTDPNPQEMVLKNVTENFNMWKNDMVDQMHEDVISLWDQSLTPCVKLTPLCVTLNCTDANDTASNSSIIKGMNNSIVGEMKNCSFNITTELRDKREKKNALFYKLDIVQLDGNSSEYRLINCNTSVITQACPKVSFDPIPIHYCAPAGYAILKCNNKTFNGTGPCNNVSTVQCTHGIKPVVSTQLLLNGSLAEGEIIIRSENITDNAKTIIVHLNESVKIECTRPSNNTRTSIRIGPGQAFYATGQVIGDIRKAHCNISESKWNETLQRVSKKLKEYFPDKNITFQPSSGGDPEITTHSFNCGGEFFYCNTSSLFNRTYMANSTDMANSAETNSTRTITLHCRIKQIINMWQEVGRAMYAPPIAGNITCISNITGLLLTRDGGNSSTETETFRPGGGNMKDNWRSELYKYKVVEVKPLGVAPTNARERVVEREKE

SEQ ID NO: 181 - DNA, 2131 bp, Artificial Sequence; identical to SEQ ID NO: 25
  Description of Artificial Sequence: Synthetic polynucleotide

SEQ ID NO: 182 - DNA, 2131 bp, Artificial Sequence; identical to SEQ ID NO: 26
  Description of Artificial Sequence: Synthetic polynucleotide

SEQ ID NO: 183 - DNA, 2125 bp, Artificial Sequence
  Description of Artificial Sequence: Synthetic polynucleotide
gtcgacaagaaatgcgcgtgatgggcatccagcgcaactacccgcagtggtggatctggtcgatgctgggcttctggatgctcatgatctgcaacggcatgtgggtgacggtgtactacggcgtgccggtgtggaaggaggccaagacgaccctgttctgcgcgtcggacgccaaggcctacgagaaggaggtgcacaacgtgtgggcgacccacgcctgcgtgcccacggaccccaacccgcaggagatggtgctgaagaacgtgaccgagaacttcaacatgtggaagaacgacatggtggaccagatgcacgaggacgtgatctccctgtgggaccagtccctgaagccctgcgtgaagctgaccccgctgtgcgtgaccctgaactgcaccaacgccaccgcgtccaacaactccatcatcgagggcatgaagaactgctccttcaacatcacgacggagctgcgcgacaagcgcgagaagaagaacgccctgttctacaagctggacatcgtgcagctggacggcaactcctcgcagtacaggctgatcaactgcaacacctccgtcatcacgcaggcgtgccccaaggtgtccttcgaccccatccccatccactactgcgcccccgccggctacgccatcctgaagtgcaacaacaagaccttcaccggcaccggcccgtgcaacaacgtgtccaccgtgcagtgcacgcacgggatcaagcccgtggtgtccacgcagctgctcctgaacgggtcgctggccgagggcgagatcatcatccggtccgagaacatcacgaacaacgcgaagaccatcatcgtgcacctgaacgagtccgtgaagatcgagtgcacccgcccgaacaacaagacgcgcacgtccatccggatcggccctggccaggccttctacgccaccggccaggtgatcggcgacatccgcaaggcgtactgcaacatctcggagtccaagtggaacgagaccctgcagcgcgtgtccaagaagctgaaggagtacttcccccacaagaacatcaccttccagccgtcgtccggcggcgacctcgagatcaccacgcactccttcaactgcggtggcgagttcttctactgcaacacgtcgtcgctgttcaaccgcacctacatggccaactccaccgacatggccaactccaccgagaccaactccacgcgcaccatcacgctccactgccgcatcaagcagatcatcaacatgtggcaggaggtgggccgcgccatgtacgcaccgcccatcgccggcaacatcacctgcatctccaacatcaccggcctcctgctgacccgcgacggcggcaagaacaacacggagaccttcaggccaggcggaggcaacatgaaggacaactggcgctccgagctgtacaagtacaaggtggtggaggtgaagcccctgggcgtggcacccaccaacgcccgcaggcgcgtcgtggagcgcgagaagcgcgccgtgggcatgggcgccgtgttcctgggcttcctgggcgctgcgggctccaccatgggtgccgcgtccatcaccctgaccgtgcaggcccgccagctgctctccggcatcgtgcagcagcagtccaacctcctgaaggccatcgaggcccagcagcacatgctgaagctgaccgtgtggggcatcaagcagctgcaggccagggtgctcgcgctcgagcgctacctgaaggaccagcagctgctcggcatgtggggctgctccggcaagctgatctgcaccaccaacgtgtactggaactcgtcctggtccaacaagacctacggcgacatctgggacaacatgacctggatgcagtgggagcgcgagatctccaactacaccgagatcatctacgagctcctcgaggagtcccagaaccagcaggagaagaacgagcaggatctgctcgcgctggaccgctggaactccctgtggaactggttcaacatcaccaactggctgtggtacatcaagatcttcatcatgatcgtgggcggcctgatcggcctgcgcatcatcttcgccgtgctgtcgctggtgaaccgcgtgcgccagggctgatgagggacccgaattcggtcaccggatcc

SEQ ID NO: 184 - DNA, 2164 bp, Artificial Sequence
  Description of Artificial Sequence: Synthetic polynucleotide
gtcgacaagaagccaccatgcgcgtgatgggcatccagcgcaactacccgcagtggtggatctggtcgatgctgggcttctggatgctcatgatctgcaacggcatgtgggtgacggtgtactacggcgtgccggtgtggaaggaggccaagacgaccctgttctgcgcgtcggacgccaaggcctacgagaaggaggtgcacaacgtgtgggcgacccacgcctgcgtgcccacggaccccaacccgcaggagatggtgctgaagaacgtgaccgagaacttcaacatgtggaagaacgacatggtggaccagatgcacgaggacgtgatctccctgtgggaccagtccctgaagccctgcgtgaagctgaccccgctgtgcgtgaccctgaactgcaccaacgcgacgaccaacgccaccgcgtccaactcctccatcatcgagggcatgaagaactgctccttcaacatcacgacggagctgcgcgacaagcgcgagaagaagaacgccctgttctacaagctggacatcgtgcagctggacggcaactcctcgcagtacaggctgatcaactgcaacacctccgtcatcacgcaggcgtgccccaaggtgtccttcgaccccatccccatccactactgcgcccccgccggctacgccatcctgaagtgcaacaacaagaccttcaccggcaccggcccgtgcaacaacgtgtccaccgtgcagtgcacgcacgggatcaagcccgtggtgtccacgcagctgctcctgaacgggtcgctggccgagggcgagatcatcatccggtccgagaacatcacgaacaacgcgaagaccatcatcgtgcacctgaacgagtccgtgaagatcgagtgcacccgcccgaacaacaagacgcgcacctccatccggatcggccctggccaggccttctacgccaccggccaggtgatcggcgacatccgcgaggcgtactgcaacatcagcgagtccaagtggaacgagaccctgcagcgcgtgtccaagaagctgaaggagtacttcccccacaagaacatcaccttccagccgtcgtccggcggcgacctcgagatcaccacgcactccttcaactgcggtggcgagttcttctactgcaacacgtcgtcgctgttcaaccgcacctacatggccaactccaccgacatggccaactccaccgagaccaactccacgcgcatcatcacgatccactgccgcatcaagcagatcatcaacatgtggcaggaggtgggccgcgccatgtacgcaccgcccatcgccggcaacatcacctgcatctccaacatcaccggcctcctgctgacccgcgacggcggcaagaacacgagggacggaggcaagaacaacacggagaccttcaggccaggcggaggcaacatgaaggacaactggcgctccgagctgtacaagtacaaggtggtggaggtgaagcccctgggcgtggcacccaccaacgcccgcaggcgcgtcgtggagcgcgagaagcgcgccgtgggcatgggcgccgtgttcctgggcttcctgggcgctgcgggctccaccatgggtgccgcgtccatcaccctgaccgtgcaggcccgccagctgctctccggcatcgtgcagcagcagtccaacctcctgaaggccatcgaggcccagcagcacatgctgaagctgaccgtgtggggcatcaagcagctgcaggccagggtgctcgcgctcgagcgctacctgaaggaccagcagctgctcggcatgtggggctgctccggcaagctgatctgcaccaccaacgtgtactggaactcgtcctggtccaacaagacctacggcgacatctgggacaacatgacctggatgcagtgggagcgcgagatctccaactacaccgagatcatctacgagctcctcgaggagtcccagaaccagcaggagaagaacgagcaggatctgctcgcgctggaccgctggaactccctgtggaactggttcaacatcaccaactggctgtggtacatcaagatcttcatcatgatcgtgggcggcctgatcggcctgcgcatcatcttcgccgtgctgtcgctggtgaaccgcgtgcgccagggctgatgagggtcctgaattcggtaaccggatcc

SEQ ID NO: 185 - DNA, 2129 bp, Artificial Sequence
  Description of Artificial Sequence: Synthetic polynucleotide
gtcgacaagaaatgcgcgtgatgggcatccagcgcaactacccgcagtggtggatctggtcgatgctgggcttctggatgctcatgatctgcaacggcatgtgggtgacggtgtactacggcgtgccggtgtggaaggaggccaagacgaccctgttctgcgcgtcggacgccaaggcctacgagaaggaggtgcacaacgtgtgggcgacccacgcctgcgtgcccacggaccccaacccgcaggagatggtgctgaagaacgtgaccgagaacttcaacatgtggaagaacgacatggtggaccagatgcacgaggacgtgatctccctgtgggaccagtccctgaagccctgcgtgaagctgaccccgctgtgcgtgaccctgaactgcaccaacgcgaccaacgccaccgcgtccaactcctccatcatcgagggcatgaagaactgctccttcaacatcacgacggagctgcgcgacaagcgcgagaagaagaacgccctgttctacaagctggacatcgtgcagctggacggcaactcctcgcagtacaggctgatcaactgcaacacctccgtcatcacgcaggcgtgccccaaggtgtccttcgaccccatccccatccactactgcgcccccgccggctacgccatcctgaagtgcaacaacaagaccttcaccggcaccggcccgtgcaacaacgtgtccaccgtgcagtgcacgcacgggatcaagcccgtggtgtccacgcagctgctcctgaacgggtcgctggccgagggcgagatcatcatccggtccgagaacatcacgaacaacgacaagaccatcatcgtgcacctgaacgagtccgtgaagatcgagtgcacccgcccgagcaacaagacgcgcacctccatccggatcggccctggccaggccttctacgccaccggccaggtgatcggcgacatccgcgaggcgtactgcaacatcagcgagtccaagtggaacgagaccctgcagcgcgtgtccaagaagctgaaggagtacttcccccacaagaacatcaccttccagccgtcgtccggcggcgacctcgagatcaccacgcactccttcaactgcggtggcgagttcttctactgcaacacgtcgtcgctgttcaaccgcacctacatggccaactccaccgacatggccaactccaccgagaccaactccacgcgcaacatcacgatccactgccgcatcaagcagatcatcaacatgtggcaggaggtgggccgcgccatgtacgcaccgcccatcgccggcaacatcacctgcatctccaacatcaccggcctcctgctgacccgcgacggcggcaagaacgacacggagaccttcaggccaggcggaggcaacatgaaggacaactggcgctccgagctgtacaagtacaaggtggtggaggtgaagcccctgggcgtggcacccaccaacgcccgcaggcgcgtcgtggagcgcgagaagcgcgccgtgggcatgggcgccgtgttcctgggcttcctgggcgctgcgggctccaccatgggtgccgcgtccatcaccctgaccgtgcaggcccgccagctgctctccggcatcgtgcagcagcagtccaacctcctgaaggccatcgaggcccagcagcacatgctgaagctgaccgtgtggggcatcaagcagctgcaggccagggtgctcgcgctcgagcgctacctgaaggaccagcagctgctcggcatgtggggctgctccggcaagctgatctgcaccaccaacgtgtactggaactcgtcctggtccaacaagacctacggcgacatctgggacaacatgacctggatgcagtgggagcgcgagatctccaactacaccgagatcatctacgagctcctcgaggagtcccagaaccagcaggagaagaacgagcaggatctgctcgcgctggaccgctggaactccctgtggaactggttcaacatcaccaactggctgtggtacatcaagatcttcatcatgatcgtgggcggcctgatcggcctgcgcatcatcttcgccgtgctgtcgctggtgaaccgcgtgcgccagggctgatgagaggtcccggtaaccggatcc

SEQ ID NO: 186 - DNA, 2168 bp, Artificial Sequence
  Description of Artificial Sequence: Synthetic polynucleotide
ggtcgacaagaagccaccatgcgcgtgatgggccggcagcgcaactacccgcagtggtggatctggtcgatgctgggcctctggatgctcatgatctgcaacggcatgtgggtgacggtgtactacggcgtgccggtgtggaaggaggccaagacgaccctgttctgcgcgtcggacgccaaggcctacgagaaggaggtgcacaacgtgtgggcgacccacgcctgcgtgcccacggaccccaacccgcaggagatggtgctgaagaacgtgaccgagaacttcaacatgtggaagaacgacatggtggaccagatgcacgaggacgtgatctccctgtgggaccagtccctgacgccctgcgtgaagctgaccccgctgtgcgtgaccctgaactgcacggacgccaacgacaccgcgtcgaacagctccatcatcaaggggatgaacaactccatcgtgggggagatgaagaactgctccttcaacatcacgacggagctgcgcgacaagcgcgagaagaagaacgccctgttctacaagctggacatcgtgcagctggacggcaactcctcggagtacaggctgatcaactgcaacacctccgtcatcacgcaggcgtgccccaaggtgtccttcgaccccatccccatccactactgcgcccccgccggctacgccatcctgaagtgcaacaacaagaccttcaacggcaccggcccgtgcaacaacgtgtccaccgtgcagtgcacgcacgggatcaagcccgtggtgtccacgcagctgctcctgaacgggtcgctggccgagggcgagatcatcatccggtcggagaacatcacggacaacgcgaagaccatcatcgtgcacctgaacgagtccgtgaagatcgagtgcacccgcccgagcaacaacacgcgcacctccatccggatcggccctggccaggccttctacgccaccggccaggtgatcggcgacatccgcaaggcgcactgcaacatctccgagtccaagtggaacgagaccctgcagcgcgtgtccaagaagctgaaggagtacttccccgacaagaacatcaccttccagccgtcgtccggcggcgaccccgagatcaccacgcactccttcaactgcggtggcgagttcttctactgcaacacgtcgtccctgttcaaccgcacctacatggccaactcgacggacatggcgaactccgcggagaccaactccacgcgcaccatcacgctccactgccgcatcaagcagatcatcaacatgtggcaggaggtgggccgcgccatgtacgcaccgcccatcgccggcaacatcacctgcatctccaacatcaccggcctcctgctgacccgcgacggaggcaactccagcacggagacggagaccttcaggccagggggaggcaacatgaaggacaactggcgctccgagctgtacaagtacaaggtggtggaggtgaagcccctgggcgtggcacccaccaacgcccgcaggcgcgtggtggagcgcgagaagcgcgccgtgggcatgggcgccgtgttcctgggcttcctgggcgctgcgggctccaccatgggtgccgcgtccatcaccctgaccgtgcaggcccgccagctgctctccggcatcgtgcagcagcagtccaacctcctgaaggccatcgaggcccagcagcacatgctgcggctgaccgtgtggggcatcaagcagctgcaggccagggtgctcgcgctcgagcgctacctgaaggaccagcagctgctcggcatgtggggctgctccggcaagctgatctgcaccaccaacgtgtactggaactcgtcctggtccaacaagacctacgacgacatctgggacaacatgacctggatgcagtgggagggggagatctccaactacaccaacatcatctacgacctcctcgaggagtcccagaaccagcaggagaagaacgagcaggatctgctcgcgctggaccgctggaactccctgtggaactggttcaacatcaccaactggctgtggtacatcaagatcttcatcatgatcgtgggcggcctgatcggcctgcggatcatcttcgccgtgctgtcgctggtgaaccgcgtgcgccagggctgatgaggtcaccgggacctgaattcggatcc

SEQ ID NO: 187 - protein, 694 aa, Artificial Sequence; identical to SEQ ID NO: 31
  Description of Artificial Sequence: Synthetic polypeptide

SEQ ID NO: 188 - protein, 694 aa, Artificial Sequence; identical to SEQ ID NO: 32
  Description of Artificial Sequence: Synthetic polypeptide

SEQ ID NO: 189 - protein, 694 aa, Artificial Sequence; identical to SEQ ID NO: 33
  Description of Artificial Sequence: Synthetic polypeptide

SEQ ID NO: 190 - protein, 705 aa, Artificial Sequence
  Description of Artificial Sequence: Synthetic polypeptide
MRVMGIQRNYPQWWIWSMLGFWMLMICNGMWVTVYYGVPVWKEAKTTLFCASDAKAYEKEVHNVWATHACVPTDPNPQEMVLKNVTENFNMWKNDMVDQMHEDVISLWDQSLKPCVKLTPLCVTLNCTNATTNATASNSSIIEGMKNCSFNITTELRDKREKKNALFYKLDIVQLDGNSSQYRLINCNTSVITQACPKVSFDPIPIHYCAPAGYAILKCNNKTFTGTGPCNNVSTVQCTHGIKPVVSTQLLLNGSLAEGEIIIRSENITNNAKTIIVHLNESVKIECTRPNNKTRTSIRIGPGQAFYATGQVIGDIREAYCNISESKWNETLQRVSKKLKEYFPHKNITFQPSSGGDLEITTHSFNCGGEFFYCNTSSLFNRTYMANSTDMANSTETNSTRIITIHCRIKQIINMWQEVGRAMYAPPIAGNITCISNITGLLLTRDGGKNTRDGGKNNTETFRPGGGNMKDNWRSELYKYKVVEVKPLGVAPTNARRRVVEREKRAVGMGAVFLGFLGAAGSTMGAASITLTVQARQLLSGIVQQQSNLLKAIEAQQHMLKLTVWGIKQLQARVLALERYLKDQQLLGMWGCSGKLICTTNVYWNSSWSNKTYGDIWDNMTWMQWEREISNYTEIIYELLEESQNQQEKNEQDLLALDRWNSLWNWFNITNWLWYIKIFIMIVGGLIGLRIIFAVLSLVNRVRQG

SEQ ID NO: 191 - protein, 697 aa, Artificial Sequence
  Description of Artificial Sequence: Synthetic polypeptide
MRVMGIQRNYPQWWIWSMLGFWMLMICNGMWVTVYYGVPVWKEAKTTLFCASDAKAYEKEVHNVWATHACVPTDPNPQEMVLKNVTENFNMWKNDMVDQMHEDVISLWDQSLKPCVKLTPLCVTLNCTNATNATASNSSIIEGMKNCSFNITTELRDKREKKNALFYKLDIVQLDGNSSQYRLINCNTSVITQACPKVSFDPIPIHYCAPAGYAILKCNNKTFTGTGPCNNVSTVQCTHGIKPVVSTQLLLNGSLAEGEIIIRSENITNNDKTIIVHLNESVKIECTRPSNKTRTSIRIGPGQAFYATGQVIGDIREAYCNISESKWNETLQRVSKKLKEYFPHKNITFQPSSGGDLEITTHSFNCGGEFFYCNTSSLFNRTYMANSTDMANSTETNSTRNITIHCRIKQIINMWQEVGRAMYAPPIAGNITCISNITGLLLTRDGGKNDTETFRPGGGNMKDNWRSELYKYKVVEVKPLGVAPTNARRRVVEREKRAVGMGAVFLGFLGAAGSTMGAASITLTVQARQLLSGIVQQQSNLLKAIEAQQHMLKLTVWGIKQLQARVLALERYLKDQQLLGMWGCSGKLICTTNVYWNSSWSNKTYGDIWDNMTWMQWEREISNYTEIIYELLEESQNQQEKNEQDLLALDRWNSLWNWFNITNWLWYIKIFIMIVGGLIGLRIIFAVLSLVNRVRQG

SEQ ID NO: 192 - protein, 706 aa, Artificial Sequence
  Description of Artificial Sequence: Synthetic polypeptide
MRVMGRQRNYPQWWIWSMLGLWMLMICNGMWVTVYYGVPVWKEAKTTLFCASDAKAYEKEVHNVWATHACVPTDPNPQEMVLKNVTENFNMWKNDMVDQMHEDVISLWDQSLTPCVKLTPLCVTLNCTDANDTASNSSIIKGMNNSIVGEMKNCSFNITTELRDKREKKNALFYKLDIVQLDGNSSEYRLINCNTSVITQACPKVSFDPIPIHYCAPAGYAILKCNNKTFNGTGPCNNVSTVQCTHGIKPVVSTQLLLNGSLAEGEIIIRSENITDNAKTIIVHLNESVKIECTRPSNNTRTSIRIGPGQAFYATGQVIGDIRKAHCNISESKWNETLQRVSKKLKEYFPDKNITFQPSSGGDPEITTHSFNCGGEFFYCNTSSLFNRTYMANSTDMANSAETNSTRTITLHCRIKQIINMWQEVGRAMYAPPIAGNITCISNITGLLLTRDGGNSSTETETFRPGGGNMKDNWRSELYKYKVVEVKPLGVAPTNARRRVVEREKRAVGMGAVFLGFLGAAGSTMGAASITLTVQARQLLSGIVQQQSNLLKAIEAQQHMLRLTVWGIKQLQARVLALERYLKDQQLLGMWGCSGKLICTTNVYWNSSWSNKTYDDIWDNMTWMQWEGEISNYTNIIYDLLEESQNQQEKNEQDLLALDRWNSLWNWFNITNWLWYIKIFIMIVGGLIGLRIIFAVLSLVNRVRQG

SEQ ID NO: 193 - DNA, 2613 bp, Artificial Sequence
  Description of Artificial Sequence: Synthetic polynucleotide
gtcgtcgacaagaagccaccatgcgcgtgatgggccggcagcgcaactacccgcagtggtggatctggtcgatgctgggcctctggatgctcatgatctgcaacggcatgtgggtgacggtgtactacggcgtgccggtgtggaaggaggccaagacgaccctgttctgcgcgtcggacgccaaggcctacgagaaggaggtgcacaacgtgtgggcgacccacgcctgcgtgcccacggaccccaacccgcaggagatggtgctgaagaacgtgaccgagaacttcaacatgtggaagaacgacatggtggaccagatgcacgaggacgtgatctccctgtgggaccagtccctgacgccctgcgtgaagctgaccccgctgtgcgtgaccctgaactgcacggacgccaacgacaccgcgtcgaacagctccatcatcaaggggatgaacaactccatcgtgggggagatgaagaactgctccttcaacatcacgacggagctgcgcgacaagcgcgagaagaagaacgccctgttctacaagctggacatcgtgcagctggacggcaactcctcggagtacaggctgatcaactgcaacacctccgtcatcacgcaggcgtgccccaaggtgtccttcgaccccatccccatccactactgcgcccccgccggctacgccatcctgaagtgcaacaacaagaccttcaacggcaccggcccgtgcaacaacgtgtccaccgtgcagtgcacgcacgggatcaagcccgtggtgtccacgcagctgctcctgaacgggtcgctggccgagggcgagatcatcatccggtcggagaacatcacggacaacgcgaagaccatcatcgtgcacctgaacgagtccgtgaagatcgagtgcacccgcccgagcaacaacacgcgcacctccatccggatcggccctggccaggccttctacgccaccggccaggtgatcggcgacatccgcaaggcgcactgcaacatctccgagtccaagtggaacgagaccctgcagcgcgtgtccaagaagctgaaggagtacttccccgacaagaacatcaccttccagccgtcgtccggcggcgaccccgagatcaccacgcactccttcaactgcggtggcgagttcttctactgcaacacgtcgtccctgttcaaccgcacctacatggccaactcgacggacatggcgaactccgcggagaccaactccacgcgcaccatcacgctccactgccgcatcaagcagatcatcaacatgtggcaggaggtgggccgcgccatgtacgcaccgcccatcgccggcaacatcacctgcatctccaacatcaccggcctcctgctgacccgcgacggaggcaactccagcacggagacggagaccttcaggccagggggaggcaacatgaaggacaactggcgctccgagctgtacaagtacaaggtggtggaggtgaagcccctgggcgtggcacccaccaacgcccgcaggcgcgtggtggagcgcgagaagcgcgccgtgggcatgggcgccgtgttcctgggcttcctgggcgctgcgggctccaccatgggtgccgcgtccatcaccctgaccgtgcaggcccgccagctgctctccggcatcgtgcagcagcagtccaacctcctgaaggccatcgaggcccagcagcacatgctgcggctgaccgtgtggggcatcaagcagctgcaggccagggtgctcgcgctcgagcgctacctgaaggaccagcagctgctcggcatgtggggctgctccggcaagctgatctgcaccaccaacgtgtactggaactcgtcctggtccaacaagacctacgacgacatctgggacaacatgacctggatgcagtgggagggggagatctccaactacaccaacatcatctacgacctcctcgaggagtcccagaaccagcaggagaagaacgagcaggatctgctcgcgctggaccgctggaactccctgtggaactggttcaacatcaccaactggctgtggtacatcaagatcttcatcatgatcgtgggcggcctgatcggcctgcggatcatcttcgccgtgctgtcgctggtgaaccgcgtgcgccagggctactccccgctgtccctgcaaacgctgatcccctccccccggggcccggacaggcccggtggcatcgaggaggagggcggcgagcaggaccgcaagcgctccacgcgcctggtgtccggcttcctggccctggtgtgggacgacctgcgctccctgtgcctgttcctctaccaccgcctgcgcgacttcatcctgatcgcggcccgcgctggcgagctgctgggccggtcctcgctgaagggcctgcgccgcggctgggaggccctgaagtacctgggcagcctggtgcagtactggggcctggagctgaagcgctccgccatctccctgctggacaccctggccatcgccgtgggcgagggcaccgaccgcatcctggagttcgtgctgggcatctgccgcgccatccgcaacatccccacccgcatccgccagggcttcgagaccgccctcctgtgatgaggtcaccgggacc

SEQ ID NO: 194 - protein, 858 aa, Artificial Sequence
  Description of Artificial Sequence: Synthetic polypeptide
MRVMGRQRNYPQWWIWSMLGLWMLMICNGMWVTVYYGVPVWKEAKTTLFCASDAKAYEKEVHNVWATHACVPTDPNPQEMVLKNVTENFNMWKNDMVDQMHEDVISLWDQSLTPCVKLTPLCVTLNCTDANDTASNSSIIKGMNNSIVGEMKNCSFNITTELRDKREKKNALFYKLDIVQLDGNSSEYRLINCNTSVITQACPKVSFDPIPIHYCAPAGYAILKCNNKTFNGTGPCNNVSTVQCTHGIKPVVSTQLLLNGSLAEGEIIIRSENITDNAKTIIVHLNESVKIECTRPSNNTRTSIRIGPGQAFYATGQVIGDIRKAHCNISESKWNETLQRVSKKLKEYFPDKNITFQPSSGGDPEITTHSFNCGGEFFYCNTSSLFNRTYMANSTDMANSAETNSTRTITLHCRIKQIINMWQEVGRAMYAPPIAGNITCISNITGLLLTRDGGNSSTETETFRPGGGNMKDNWRSELYKYKVVEVKPLGVAPTNARRRVVEREKRAVGMGAVFLGFLGAAGSTMGAASITLTVQARQLLSGIVQQQSNLLKAIEAQQHMLRLTVWGIKQLQARVLALERYLKDQQLLGMWGCSGKLICTTNVYWNSSWSNKTYDDIWDNMTWMQWEGEISNYTNIIYDLLEESQNQQEKNEQDLLALDRWNSLWNWFNITNWLWYIKIFIMIVGGLIGLRIIFAVLSLVNRVRQGYSPLSLQTLIPSPRGPDRPGGIEEEGGEQDRKRSTRLVSGFLALVWDDLRSLCLFLYHRLRDFILIAARAGELLGRSSLKGLRRGWEALKYLGSLVQYWGLELKRSAISLLDTLAIAVGEGTDRILEFVLGICRAIRNIPTRIRQGFETALL

SEQ ID NO: 195 - DNA, 1947 bp, Artificial Sequence
  Description of Artificial Sequence: Synthetic polynucleotide
atgcccatgggcagcctgcagcccctggccaccctgtacctgctgggcatgctggtggctagcgtgctggccgccgagaacctgtgggtgaccgtctactatggcgtgcccgtctggaaggaagccaaaaccacactgttctgcgctagcgacgctaaggcatacgagaaagaagtgcacaatgtctgggctactcatgcatgcgtgcctaccgatccaaatccccaggagatggtgctgaagaacgtcacagaaaactttaatatgtggaagaacgacatggtggatcagatgcacgaggacgtgatcagcctgtgggatcagtccctgaagccatgcgtgaaactgactcccctgtgcgtcaccctgaactgtactaatgccaccgcttccaacagctccatcattgaggggatgaagaactgttctttcaatatcactaccgagctgcgcgacaagcgagaaaagaaaaatgccctgttttacaaactggacatcgtgcagctggatggcaactctagtcagtatagactgattaactgcaatacaagcgtgatcactcaggcatgtccaaaggtcagtttcgatcctattccaatccactactgcgcacccgccggatatgctatcctgaagtgtaacaacaagaccttcaccggcactgggccttgcaacaacgtgagcaccgtccagtgtacacatggcattaagccagtggtcagcacccagctgctgctgaacggcagcctggcagagggcgaaatcattatccgcagcgagaacatcacaaataatgtgaagactatcatcgtccacctgaacgagagcgtgaagattgaatgcacacggcccaacaacaagaccaggacatccattcgcatcggacctggccaggccttctacgctactggccaggtcatcggggacatcagagaggcctattgtaacatcaatgagtcaaagtggaatgaaactctgcagagggtgagcaagaaactgaaggaatacttccctcacaaaaacatcacctttcagccatcaagcggcggggacctggagattacaactcattctttcaattgcggaggcgaattcttttactgtaacacctcctctctgtttaatcgcacatatatggctaacagtactgatatggcaaactctactgagaccaatagtacacgaactattaccatccattgccggatcaagcagattatcaacatgtggcaggaagtggggcgggccatgtatgctccccctattgcaggaaatattacctgtatcagcaacattaccggcctgctgctgacaagagacgggggaaagaacaatacagagacttttaggcctggcgggggaaacatgaaagataattggcgctccgagctgtacaagtataaagtggtcaagatcgaaccactgggagtggcacctacccgatgtaaacggagagtggtcggaaggcgccgacggagaagggcagtgggaatcggagccgtcttcctgggctttctgggagcagctggcagcacaatgggagcagcctctatgaccctgacagtgcaggctcgaaatctgctgagtgggatcgtgcagcagcagtcaaacctgctgcgagcaccagaggcacagcagcatctgctgaagctgaccgtgtggggcatcaagcagctgcaggccagagtgctggctgtcgaacggtacctgagagatcagcagctgctgggaatctggggatgcagcggaaagctgatttgctgtacaaacgtgccctggaatagttcatggtcaaacaggaatctgagcgagatctgggacaatatgacctggctgcagtgggataaggaaatcagtaactacacacagatcatctatggcctgctggaggaatcacagaaccagcaggagaaaaatgaacaggacctgctggccctggattgatga

SEQ ID NO: 196 - DNA, 1977 bp, Artificial Sequence
  Description of Artificial Sequence: Synthetic polynucleotide
atggggagcctgcagcctctggcaaccctgtatctgctgggaatgctggtcgcaagtgtcctggccgccgaaaacctgtgggtcaccgtgtattatggagtgccggtgtggaaggaggccaagacgaccctgttctgcgcgtcggacgccaaggcctacgagaaggaggtgcacaacgtgtgggcgacccacgcctgcgtgcccacggaccccaacccgcaggagatggtgctgaagaacgtgaccgagaacttcaacatgtggaagaacgacatggtggaccagatgcacgaggacgtgatctccctgtgggaccagtccctgaagccctgcgtgaagctgaccccgctgtgcgtgaccctgaactgcaccaacgcgaacgccaccgcgtccaactcctctatcatcgaggggatgaactcctccatcatcgagggcatgaagaactgctccttcaacatcacgacggagctgcgcgacaagcgcgagaagaagaacgccctgttctacaagctggacatcgtgcagctggacggcaactcctcgcagtacaggctgatcaactgcaacacctccgtcatcacgcaggcgtgccccaaggtgtccttcgaccccatccccatccactactgcgcccccgccggctacgccatcctgaagtgcaacaacaagaccttcaacggcaccggcccgtgcaacaacgtgtccaccgtgcagtgcacgcacgggatcaagcccgtggtgtccacgcagctgctcctgaacgggtcgctggccgagggcgagatcatcatccggtccgagaacatcacggacaacgggaagaccatcatcgtgcacctgaacgagtccgtgaagatcgagtgcacccgcccgagcaacaacacgcgcacctccatccggatcggccctggccaggccttctacgccaccggccaggtgatcggcgacatccgcgaggcgcactgcaacatctcggagtccaagtggaacgagaccctgcagcgcgtgtccgagaagctgaaggagtacttcccccacaagaacatcaccttccagccgtcgtccggcggcgacctcgagatcaccacgcactccttcaactgcggtggcgagttcttctactgcaacacgtcgtcgctgttcaaccgcacctacatggccacgtccaccgacatggccaactccaccgagaccaactccacgcgcatcatcacgatccggtgccgcatcaagcagatcatcaacatgtggcaggaggtgggccgcgccatgtacgcaccgcccatcgccggcaacatcacctgcatctccaacatcaccggcctcctgctgacccgcgacggcggcaagaacaacacggagaccttcgagacgttcaggccaggcggaggcaacatgaaggataactggaggtccgagctgtacaagtataaagtggtcaagatcgaacctctgggagtggcaccaaccagatgcaagcgaagagtggtcggacgaaggaggaggaggcgagcagtcggaattggggccgtgttcctgggatttctgggcgccgctgggagtacaatgggagcagcctcaatgactctgaccgtgcaggccaggaatctgctgagcggcatcgtccagcagcagtccaacctgctgcgcgctcctgaagcacagcagcacctgctgaagctgaccgtgtggggcatcaaacagctgcaggctagggtgctggcagtcgagcggtacctgagagaccagcagctgctgggaatctggggctgctctgggaagctgatttgttgcacaaatgtgccttggaactctagttggtcaaatcgcaacctgagcgagatctgggacaatatgacttggctgcagtgggataaagaaattagtaactacacccagatcatctacggcctgctggaagagtcacagaatcagcaggagaagaacgaacaggacctgctggcactggattga

SEQ ID NO: 197 - DNA, 1944 bp, Artificial Sequence
  Description of Artificial Sequence: Synthetic polynucleotide
atggggagcctgcagcctctggcaaccctgtatctgctgggaatgctggtcgcaagtgtcctggccgccgaaaacctgtgggtcaccgtgtattatggagtgccggtgtggaaggaggccaagacgaccctgttctgcgcgtcggacgccaaggcctacgagaaggaggtgcacaacgtgtgggcgacccacgcctgcgtgcccacggaccccaacccgcaggagatggtgctgaagaacgtgaccgagaacttcaacatgtggaagaacgacatggcggaccagatgcacgaggacgtgatctccctgtgggaccagtccctgaagccctgcgtgaagctgaccccgctgtgcgtgaccctgaactgcatcgacgccaacgcgaccgcgtccaacgcgacggcatccaactcgtccatcatcgaggggatgaagaactgctccttcaacatcacgacggagctgcgcgacaagatcgagaagaagaacgccctgttctacaagctggacatcgtgcagctggacggcaactcctcgcagtacaggctgatcaactgcaacacctccgtcatcacgcaggcgtgccccaaggtgtccttcgaccccatccccatccactactgcgcccccgccggctacgccatcctgaagtgcaacaacaagaccttcaacggcaccggcccgtgcaacaacgtgtccaccgtgcagtgcacgcacgggatcaagcccgtggtgtccacgcagctgctcctgaacgggtcgctggccgagggcgagatcatcatccggtcggagaacatcacgaacagcgcgaagaccatcatcgtgcacctgaacgagtccgtgaagatcgagtgcacccgcccgagcaacaacacgcgcacctccatccggatcggccctggccaggccttctacgccaccggccaggtgatcggcgacatccgcaaggcgcactgcaacatctccgagtccaagtggaacgagaccctgcagcgcgtgtccaagaagctgaaggagtacttcccccacaagaacatcaccttccagccgtcgtccggcggcgacctcgagatcaccacgcactccttcaactgcggtggcgagttcttctactgcaacacgtcgtcgctgttcaaccgcacctacatggccaactccaccgagaccaactccacgcgcacgatcacgctccactgccgcatcaagcagatcatcaacatgtggcaggaggtgggccgcgccatgtacgcaccgcccatcgccggcaacatcacctgcatctccaacatcaccggcctcctgctgacccgcgacggcggcaacaacaacaccacggagaccttcaggccagggggaggcaacatgaaggataactggaggtccgagctgtacaagtataaagtggtcaagatcgaacctctgggagtggcaccaaccagatgcaagcgaagagtggtcggacgaaggaggaggaggcgagcagtcggaattggggccgtgttcctgggatttctgggcgccgctgggagtacaatgggagcagcctcaatgactctgaccgtgcaggccaggaatctgctgagcggcatcgtccagcagcagtccaacctgctgcgcgctcctgaagcacagcagcacctgctgaagctgaccgtgtggggcatcaaacagctgcaggctagggtgctggcagtcgagcggtacctgagagaccagcagctgctgggaatctggggctgctctgggaagctgatttgttgcacaaatgtgccttggaactctagttggtcaaatcgcaacctgagcgagatctgggacaatatgacttggctgcagtgggataaagaaattagtaactacacccagatcatctacggcctgctggaagagtcacagaatcagcaggagaagaacgaacaggacctgctggcactggattga

SEQ ID NO: 198 - DNA, 1989 bp, Artificial Sequence
  Description of Artificial Sequence: Synthetic polynucleotide
atggggagcctgcagcctctggcaaccctgtatctgctgggaatgctggtcgcaagtgtcctggccgccgaaaacctgtgggtcaccgtgtattatggagtgccggtgtggaaggaggccaagacgaccctgttctgcgcgtcggacgccaaggcctacgagaaggaggtgcacaacgtgtgggcgacccacgcctgcgtgcccacggaccccaacccgcaggagatggtgctggagaacgtgaccgagaacttcaacatgtggaagaacgacatggcggaccagatgcacgaggacgtgatctccctgtgggaccagtccctgaagccctgcgtgaagctgaccccgctgtgcgtgaccctgaactgcacggacgccaacgccaccgcgtcgaacaccaacgcgaccgcaagcaacatcaacgcgacggcgtcgaagtcctccatcatcgaggagatgaagaactgctccttcaacatcacgacggagctgcgcgacaagcgcgagaagaagtacgccctgttctacaagctggacatcgtgcagctggacggcaactcctcgcagtacaggctgatcaactgcaacacctccgtcatcacgcaggcgtgccccaaggtgtccttcgaccccatccccatccactactgcgcccccgccggctacgccatcctgaagtgcaacaacaagaccttcaacggcaccggcccgtgcaacaacgtgtccaccgtgcagtgcacgcacgggatcaagcccgtggtgtccacgcagctgctcctgaacgggtcgctggccgagggcgagatcatcatccggtcggagaacatcacggacaacagcaagaccatcatcgtgcacctgaacgagtccgtgaagatcgagtgcacccgcccgagcaacaacacgcgcacctccatccggatcggccctggccaggccttctacgccaccggccaagtgatcggcgacatccgcgaggcgcactgcaacatctccgagtccaagtggaacgagaccctgcagcgcgtgtccaagaagctgaaggagtacttccccgacaagaacatcaccttccagccgtcgtccggcggcgaccccgagatcaccacgcactccttcaactgcggtggcgagttcttctactgcaacacgtcgtccctgttcaaccgcacctacatggcgaactccaccgagaccaactccacgcgcaccatcacgctgcactgccgcatcaagcagatcatcaacatgtggcaggaggtgggccgcgccatgtacgcaccgcccatcgccggcaacatcacctgcatctccaacatcaccggcctcctgctgacccgcgacggcggcgagaacacccgggacggaggcaacaacaacacggagaccttcaggccagagggaggcaacatgaaggataactggaggtccgagctgtacaagtataaagtggtcaagatcgaacctctgggagtggcaccaaccagatgcaagcgaagagtggtcggacgaaggaggaggaggcgagcagtcggaattggggccgtgttcctgggatttctgggcgccgctgggagtacaatgggagcagcctcaatgactctgaccgtgcaggccaggaatctgctgagcggcatcgtccagcagcagtccaacctgctgcgcgctcctgaagcacagcagcacctgctgaagctgaccgtgtggggcatcaaacagctgcaggctagggtgctggcagtcgagcggtacctgagagaccagcagctgctgggaatctggggctgctctgggaagctgatttgttgcacaaatgtgccttggaactctagttggtcaaatcgcaacctgagcgagatctgggacaatatgacttggctgcagtgggataaagaaattagtaactacacccagatcatctacggcctgctggaagagtcacagaatcagcaggagaagaacgaacaggacctgctggcactggattga

SEQ ID NO: 199 - DNA, 1947 bp, Artificial Sequence
  Description of Artificial Sequence: Synthetic polynucleotide
atgcccatgggcagcctgcagcccctggccaccctgtacctgctgggcatgctggtggctagcgtgctggccgccgagaacctgtgggtgaccgtctactatggcgtgcccgtctggaaggaagccaaaaccacactgttctgcgctagcgacgctaaggcatacgagaaagaagtgcacaatgtctgggctactcatgcatgcgtgcctaccgatccaaatccccaggagatggtgctgaagaacgtcacagaaaactttaatatgtggaagaacgacatggtggatcagatgcacgaggacgtgatcagcctgtgggatcagtccctgaagccatgcgtgaaactgactcccctgtgcgtcaccctgaactgtactaatgccaccgcttccaacagctccatcattgaggggatgaagaactgttctttcaatatcactaccgagctgcgcgacaagcgagaaaagaaaaatgccctgttttacaaactggacatcgtgcagctggatggcaactctagtcagtatagactgattaactgcaatacaagcgtgtgcactcaggcatgtccaaaggtcagtttcgatcctattccaatccactactgcgcacccgccggatatgctatcctgaagtgtaacaacaagaccttcaccggcactgggccttgcaacaacgtgagcaccgtccagtgtacacatggcattaagccagtggtcagcacccagctgctgctgaacggcagcctggcagagggcgaaatcattatccgcagcgagaacatcacaaataatgtgaagactatcatcgtccacctgaacgagagcgtgaagattgaatgcacacggcccaacaacaagaccaggacatccattcgcatcggacctggccaggccttctacgctactggccaggtcatcggggacatcagagaggcctattgtaacatcaatgagtcaaagtggaatgaaactctgcagagggtgagcaagaaactgaaggaatacttccctcacaaaaacatcacctttcagccatcaagcggcggggacctggagattacaactcattctttcaattgcggaggcgaattcttttactgtaacacctcctctctgtttaatcgcacatatatggctaacagtactgatatggcaaactctactgagaccaatagtacacgaactattaccatccattgccggatcaagcagattatcaacatgtggcaggaagtggggcggtgcatgtatgctccccctattgcaggaaatattacctgtatcagcaacattaccggcctgctgctgacaagagacgggggaaagaacaatacagagacttttaggcctggcgggggaaacatgaaagataattggcgctccgagctgtacaagtataaagtggtcaagatcgaaccactgggagtggcacctacccgatgtaaacggagagtggtcggaaggcgccgacggagaagggcagtgggaatcggagccgtcttcctgggctttctgggagcagctggcagcacaatgggagcagcctctatgaccctgacagtgcaggctcgaaatctgctgagtgggatcgtgcagcagcagtcaaacctgctgcgagcaccagaggcacagcagcatctgctgaagctgaccgtgtggggcatcaagcagctgcaggccagagtgctggctgtcgaacggtacctgagagatcagcagctgctgggaatctggggatgcagcggaaagctgatttgctgtacaaacgtgccctggaatagttcatggtcaaacaggaatctgagcgagatctgggacaatatgacctggctgcagtgggataaggaaatcagtaactacacacagatcatctatggcctgctggaggaatcacagaaccagcaggagaaaaatgaacaggacctgctggccctggattgatga

SEQ ID NO: 200 - DNA, 1977 bp, Artificial Sequence
  Description of Artificial Sequence: Synthetic polynucleotide
atggggagcctgcagcctctggcaaccctgtatctgctgggaatgctggtcgcaagtgtcctggccgccgaaaacctgtgggtcaccgtgtattatggagtgccggtgtggaaggaggccaagacgaccctgttctgcgcgtcggacgccaaggcctacgagaaggaggtgcacaacgtgtgggcgacccacgcctgcgtgcccacggaccccaacccgcaggagatggtgctgaagaacgtgaccgagaacttcaacatgtggaagaacgacatggtggaccagatgcacgaggacgtgatctccctgtgggaccagtccctgaagccctgcgtgaagctgaccccgctgtgcgtgaccctgaactgcaccaacgcgaacgccaccgcgtccaactcctctatcatcgaggggatgaactcctccatcatcgagggcatgaagaactgctccttcaacatcacgacggagctgcgcgacaagcgcgagaagaagaacgccctgttctacaagctggacatcgtgcagctggacggcaactcctcgcagtacaggctgatcaactgcaacacctccgtctgcacgcaggcgtgccccaaggtgtccttcgaccccatccccatccactactgcgcccccgccggctacgccatcctgaagtgcaacaacaagaccttcaacggcaccggcccgtgcaacaacgtgtccaccgtgcagtgcacgcacgggatcaagcccgtggtgtccacgcagctgctcctgaacgggtcgctggccgagggcgagatcatcatccggtccgagaacatcacggacaacgggaagaccatcatcgtgcacctgaacgagtccgtgaagatcgagtgcacccgcccgagcaacaacacgcgcacctccatccggatcggccctggccaggccttctacgccaccggccaggtgatcggcgacatccgcgaggcgcactgcaacatctcggagtccaagtggaacgagaccctgcagcgcgtgtccgagaagctgaaggagtacttcccccacaagaacatcaccttccagccgtcgtccggcggcgacctcgagatcaccacgcactccttcaactgcggtggcgagttcttctactgcaacacgtcgtcgctgttcaaccgcacctacatggccacgtccaccgacatggccaactccaccgagaccaactccacgcgcatcatcacgatccggtgccgcatcaagcagatcatcaacatgtggcaggaggtgggccgctgcatgtacgcaccgcccatcgccggcaacatcacctgcatctccaacatcaccggcctcctgctgacccgcgacggcggcaagaacaacacggagaccttcgagacgttcaggccaggcggaggcaacatgaaggataactggaggtccgagctgtacaagtataaagtggtcaagatcgaacctctgggagtggcaccaaccagatgcaagcgaagagtggtcggacgaaggaggaggaggcgagcagtcggaattggggccgtgttcctgggatttctgggcgccgctgggagtacaatgggagcagcctcaatgactctgaccgtgcaggccaggaatctgctgagcggcatcgtccagcagcagtccaacctgctgcgcgctcctgaagcacagcagcacctgctgaagctgaccgtgtggggcatcaaacagctgcaggctagggtgctggcagtcgagcggtacctgagagaccagcagctgctgggaatctggggctgctctgggaagctgatttgttgcacaaatgtgccttggaactctagttggtcaaatcgcaacctgagcgagatctgggacaatatgacttggctgcagtgggataaagaaattagtaactacacccagatcatctacggcctgctggaagagtcacagaatcagcaggagaagaacgaacaggacctgctggcactggattga

SEQ ID NO: 201 - DNA, 1944 bp, Artificial Sequence
  Description of Artificial Sequence: Synthetic polynucleotide
atggggagcctgcagcctctggcaaccctgtatctgctgggaatgctggtcgcaagtgtcctggccgccgaaaacctgtgggtcaccgtgtattatggagtgccggtgtggaaggaggccaagacgaccctgttctgcgcgtcggacgccaaggcctacgagaaggaggtgcacaacgtgtgggcgacccacgcctgcgtgcccacggaccccaacccgcaggagatggtgctgaagaacgtgaccgagaacttcaacatgtggaagaacgacatggcggaccagatgcacgaggacgtgatctccctgtgggaccagtccctgaagccctgcgtgaagctgaccccgctgtgcgtgaccctgaactgcatcgacgccaacgcgaccgcgtccaacgcgacggcatccaactcgtccatcatcgaggggatgaagaactgctccttcaacatcacgacggagctgcgcgacaagatcgagaagaagaacgccctgttctacaagctggacatcgtgcagctggacggcaactcctcgcagtacaggctgatcaactgcaacacctccgtctgcacgcaggcgtgccccaaggtgtccttcgaccccatccccatccactactgcgcccccgccggctacgccatcctgaagtgcaacaacaagaccttcaacggcaccggcccgtgcaacaacgtgtccaccgtgcagtgcacgcacgggatcaagcccgtggtgtccacgcagctgctcctgaacgggtcgctggccgagggcgagatcatcatccggtcggagaacatcacgaacagcgcgaagaccatcatcgtgcacctgaacgagtccgtgaagatcgagtgcacccgcccgagcaacaacacgcgcacctccatccggatcggccctggccaggccttctacgccaccggccaggtgatcggcgacatccgcaaggcgcactgcaacatctccgagtccaagtggaacgagaccctgcagcgcgtgtccaagaagctgaaggagtacttcccccacaagaacatcaccttccagccgtcgtccggcggcgacctcgagatcaccacgcactccttcaactgcggtggcgagttcttctactgcaacacgtcgtcgctgttcaaccgcacctacatggccaactccaccgagaccaactccacgcgcacgatcacgctccactgccgcatcaagcagatcatcaacatgtggcaggaggtgggccgctgcatgtacgcaccgcccatcgccggcaacatcacctgcatctccaacatcaccggcctcctgctgacccgcgacggcggcaacaacaacaccacggagaccttcaggccagggggaggcaacatgaaggataactggaggtccgagctgtacaagtataaagtggtcaagatcgaacctctgggagtggcaccaaccagatgcaagcgaagagtggtcggacgaaggaggaggaggcgagcagtcggaattggggccgtgttcctgggatttctgggcgccgctgggagtacaatgggagcagcctcaatgactctgaccgtgcaggccaggaatctgctgagcggcatcgtccagcagcagtccaacctgctgcgcgctcctgaagcacagcagcacctgctgaagctgaccgtgtggggcatcaaacagctgcaggctagggtgctggcagtcgagcggtacctgagagaccagcagctgctgggaatctggggctgctctgggaagctgatttgttgcacaaatgtgccttggaactctagttggtcaaatcgcaacctgagcgagatctgggacaatatgacttggctgcagtgggataaagaaattagtaactacacccagatcatctacggcctgctggaagagtcacagaatcagcaggagaagaacgaacaggacctgctggcactggattga

SEQ ID NO: 202 - DNA, 1989 bp, Artificial Sequence
  Description of Artificial Sequence: Synthetic polynucleotide
atggggagcctgcagcctctggcaaccctgtatctgctgggaatgctggtcgcaagtgtcctggccgccgaaaacctgtgggtcaccgtgtattatggagtgccggtgtggaaggaggccaagacgaccctgttctgcgcgtcggacgccaaggcctacgagaaggaggtgcacaacgtgtgggcgacccacgcctgcgtgcccacggaccccaacccgcaggagatggtgctggagaacgtgaccgagaacttcaacatgtggaagaacgacatggcggaccagatgcacgaggacgtgatctccctgtgggaccagtccctgaagccctgcgtgaagctgaccccgctgtgcgtgaccctgaactgcacggacgccaacgccaccgcgtcgaacaccaacgcgaccgcaagcaacatcaacgcgacggcgtcgaagtcctccatcatcgaggagatgaagaactgctccttcaacatcacgacggagctgcgcgacaagcgcgagaagaagtacgccctgttctacaagctggacatcgtgcagctggacggcaactcctcgcagtacaggctgatcaactgcaacacctccgtctgcacgcaggcgtgccccaaggtgtccttcgaccccatccccatccactactgcgcccccgccggctacgccatcctgaagtgcaacaacaagaccttcaacggcaccggcccgtgcaacaacgtgtccaccgtgcagtgcacgcacgggatcaagcccgtggtgtccacgcagctgctcctgaacgggtcgctggccgagggcgagatcatcatccggtcggagaacatcacggacaacagcaagaccatcatcgtgcacctgaacgagtccgtgaagatcgagtgcacccgcccgagcaacaacacgcgcacctccatccggatcggccctggccaggccttctacgccaccggccaagtgatcggcgacatccgcgaggcgcactgcaacatctccgagtccaagtggaacgagaccctgcagcgcgtgtccaagaagctgaaggagtacttccccgacaagaacatcaccttccagccgtcgtccggcggcgaccccgagatcaccacgcactccttcaactgcggtggcgagttcttctactgcaacacgtcgtccctgttcaaccgcacctacatggcgaactccaccgagaccaactccacgcgcaccatcacgctgcactgccgcatcaagcagatcatcaacatgtggcaggaggtgggccgctgcatgtacgcaccgcccatcgccggcaacatcacctgcatctccaacatcaccggcctcctgctgacccgcgacggcggcgagaacacccgggacggaggcaacaacaacacggagaccttcaggccagagggaggcaacatgaaggataactggaggtccgagctgtacaagtataaagtggtcaagatcgaacctctgggagtggcaccaaccagatgcaagcgaagagtggtcggacgaaggaggaggaggcgagcagtcggaattggggccgtgttcctgggatttctgggcgccgctgggagtacaatgggagcagcctcaatgactctgaccgtgcaggccaggaatctgctgagcggcatcgtccagcagcagtccaacctgctgcgcgctcctgaagcacagcagcacctgctgaagctgaccgtgtggggcatcaaacagctgcaggctagggtgctggcagtcgagcggtacctgagagaccagcagctgctgggaatctggggctgctctgggaagctgatttgttgcacaaatgtgccttggaactctagttggtcaaatcgcaacctgagcgagatctgggacaatatgacttggctgcagtgggataaagaaattagtaactacacccagatcatctacggcctgctggaagagtcacagaatcagcaggagaagaacgaacaggacctgctggcactggattga

SEQ ID NO: 203 - DNA, 1944 bp, Artificial Sequence
  Description of Artificial Sequence: Synthetic polynucleotide
atgcccatgggctccctgcagcccctggccaccctgtacctgctgggcatgctggtggcctccgtgctggccgccgagaacctgtgggtgaccgtgtactacggcgtgcccgtgtggaaggaggccaagaccaccctgttctgcgcctccgacgccaaggcctacgagaagaaggtgcacaacgtgtgggccacccacgcctgcgtgcccaccgaccccaacccccaggagatggtgctgaagaacgtgaccgagaacttcaacatgtggaagaacgacatggtggaccagatgcacgaggacgtgatctccctgtgggaccagtccctgaagccctgcgtgaagctgacccccctgtgcgtgaccctgaactgcaccaacgccaccgcctccaactcctccatcatcgagggcatgaagaactgctccttcaacatcaccaccgagctgcgcgacaagcgcgagaagaagaacgccctgttctacaagctggacatcgtgcagctggacggcaactcctcccagtaccgcctgatcaactgcaacacctccgtgatcacccaggcctgccccaaggtgtccttcgaccccatccccatccactactgcgcccccgccggctacgccatcctgaagtgcaacaacaagaccttcaccggcaccggcccctgcaacaacgtgtccaccgtgcagtgcacccacggcatcaagcccgtggtgtccacccagctgctgctgaacggctccctggccgagggcgagatcatcatccgctccgagaacatcaccaagaacgtgaagaccatcatcgtgcacctgaacgagtccgtgaagatcgagtgcacccgccccaacaacaagacccgcacctccatccgcatcggccccggccagtggttctacgccaccggccaggtgatcggcgacatccgcgaggcctactgcaacatcaacgagtccaagtggaacgagaccctgcagcgcgtgtccaagaagctgaaggagtacttcccccacaagaacatcaccttccagccctcctccggcggcgacctggagatcaccacccactccttcaactgcggcggcgagttcttctactgcaacacctcctccctgttcaaccgcacctacatggccaactccaccgacatggccaactccaccgagaccaactccacccgcaccatcaccatccactgccgcatcaagcagatcatcaacatgtggcaggaggtgggccgcgccatgtacgccccccccatcgccggcaacatcacctgcatctccaacatcaccggcctgctgctgacccgcgacggcggcaagaacaacaccgagaccttccgccccggcggcggcaacatgaaggacaactggcgctccgagctgtacaagtacaaggtggtgaagatcgagcccctgggcgtggcccccacccgctgcaagcgccgcgtggtgggccgccgccgccgccgccgcgccgtgggcatcggcgccgtgttcctgggcttcctgggcgccgccggctccaccatgggcgccgcctccatgaccctgaccgtgcaggcccgcaacctgctgtccggcatcgtgcagcagcagtccaacctgctgcgcgcccccgaggcccagcagcacctgctgaagctgaccgtgtggggcatcaagcagctgcaggcccgcgtgctggccgtggagcgctacctgcgcgaccagcagctgctgggcatctggggctgctccggcaagctgatctgctgcaccaacgtgccctggaactcctcctggtccaaccgcaacctgtccgagatctgggacaacatgacctggctgcagtgggacaaggagatctccaactacacccagatcatctacggcctgctggaggagtcccagaaccagcaggagaagaacgagcaggacctgctggccctggactag

SEQ ID NO: 204 - DNA, 1944 bp, Artificial Sequence
  Description of Artificial Sequence: Synthetic polynucleotide
atgcccatgggctccctgcagcccctggccaccctgtacctgctgggcatgctggtggcctccgtgctggccgccgagaacctgtgggtgaccgtgtactacggcgtgcccgtgtggaaggaggccaagaccaccctgttctgcgcctccgacgccaaggcctacgagaaggaggtgcgcaacgtgtgggccacccacgcctgcgtgcccaccgaccccaacccccaggagatggtgctgaagaacgtgaccgagaacttcaacatgtggaagaacgacatggtggaccagatgcacgaggacgtgatctccctgtgggaccagtccctgaagccctgcgtgaagctgacccccctgtgcgtgaccctgaactgcaccaacgccaccgcctccaactcctccatcatcgagggcatgaagaactgctccttcaacatcaccaccgagctgcgcgacaagcgcgagaagaagaacgccctgttctacaagctggacatcgtgcagctggacggcaactcctcccagtaccgcctgatcaactgcaacacctccgtgatcacccaggcctgccccaaggtgtccttcgaccccatccccatccactactgcgcccccgccggctacgccatcctgaagtgcaacaacaagaccttcaccggcaccggcccctgcaacaacgtgtccaccgtgcagtgcacccacggcatcaagcccgtggtgtccacccagctgctgctgaacggctccctggccgagggcgagatcatcatccgctccgagaacatcaccaagaacgtgaagaccatcatcgtgcacctgaacgagtccgtgaagatcgagtgcacccgccccaacaacaagacccgcacctccatccgcatcggccccggccagtggttctacgccaccggccaggtgatcggcgacatccgcgaggcctactgcaacatcaacgagtccaagtggaacgagaccctgcagcgcgtgtccaagaagctgaaggagtacttcccccacaagaacatcaccttccagccctcctccggcggcgacctggagatcaccacccactccttcaactgcggcggcgagttcttctactgcaacacctcctccctgttcaaccgcacctacatggccaactccaccgacatggccaactccaccgagaccaactccacccgcaccatcaccatccactgccgcatcaagcagatcatcaacatgtggcaggaggtgggccgcgccatgtacgccccccccatcgccggcaacatcacctgcatctccaacatcaccggcctgctgctgacccgcgacggcggcaagaacaacaccgagaccttccgccccggcggcggcaacatgaaggacaactggcgctccgagctgtacaagtacaaggtggtgaagatcgagcccctgggcgtggcccccacccgctgcaagcgccgcgtggtgggccgccgccgccgccgccgcgccgtgggcatcggcgccgtgttcctgggcttcctgggcgccgccggctccaccatgggcgccgcctccatgaccctgaccgtgcaggcccgcaacctgctgtccggcatcgtgcagcagcagtccaacctgctgcgcgcccccgaggcccagcagcacctgctgaagctgaccgtgtggggcatcaagcagctgcaggcccgcgtgctggccgtggagcgctacctgcgcgaccagcagctgctgggcatctggggctgctccggcaagctgatctgctgcaccaacgtgccctggaactcctcctggtccaaccgcaacctgtccgagatctgggacaacatgacctggctgcagtgggacaaggagatctccaactacacccagatcatctacggcctgctggaggagtcccagaaccagcaggagaagaacgagcaggacctgctggccctggactag

SEQ ID NO: 205 - DNA, 1944 bp, Artificial Sequence
  Description of Artificial Sequence: Synthetic polynucleotide
atgcccatgggctccctgcagcccctggccaccctgtacctgctgggcatgctggtggcctccgtgctggccgccgagaacctgtgggtgaccgtgtactacggcgtgcccgtgtggaaggaggccaagaccaccctgttctgcgcctccgacgccaaggcctacgagaagaaggtgcacaacgtgtgggccacccacgcctgcgtgcccaccgaccccaacccccaggagatggtgctgaagaacgtgaccgagaacttcaacatgtggaagaacgacatggtggaccagatgcacgaggacgtgatctccctgtgggaccagtccctgaagccctgcgtgaagctgacccccctgtgcgtgaccctgaactgcaccaacgccaccgcctccaactcctccatcatcgagggcatgaagaactgctccttcaacatcaccaccgagctgcgcgacaagcgcgagaagaagaacgccctgttctacaagctggacatcgtgcagctggacggcaactcctcccagtaccgcctgatcaactgcaacacctccgtgatcacccaggcctgccccaaggtgtccttcgaccccatccccatccactactgcgcccccgccggctacgccatcctgaagtgcaacaacaagaccttcaccggcaccggcccctgcaacaacgtgtccaccgtgcagtgcacccacggcatcaagcccgtggtgtccacccagctgctgctgaacggctccctggccgagggcgagatcatcatccgctccgagaacatcaccgacaacggcaagaccatcatcgtgcacctgaacgagtccgtgaagatcgagtgcacccgccccaacaacaagacccgcacctccatccgcatcggccccggccagtggttctacgccaccggccaggtgatcggcgacatccgcgaggcctactgcaacatcaacgagtccaagtggaacgagaccctgcagcgcgtgtccaagaagctgaaggagtacttcccccacaagaacatcaccttccagccctcctccggcggcgacctggagatcaccacccactccttcaactgcggcggcgagttcttctactgcaacacctcctccctgttcaaccgcacctacatggccaactccaccgacatggccaactccaccgagaccaactccacccgcaccatcaccatccactgccgcatcaagcagatcatcaacatgtggcaggaggtgggccgcgccatgtacgccccccccatcgccggcaacatcacctgcatctccaacatcaccggcctgctgctgacccgcgacggcggcaagaacaacaccgagaccttccgccccggcggcggcaacatgaaggacaactggcgctccgagctgtacaagtacaaggtggtgaagatcgagcccctgggcgtggcccccacccgctgcaagcgccgcgtggtgggccgccgccgccgccgccgcgccgtgggcatcggcgccgtgttcctgggcttcctgggcgccgccggctccaccatgggcgccgcctccatgaccctgaccgtgcaggcccgcaacctgctgtccggcatcgtgcagcagcagtccaacctgctgcgcgcccccgaggcccagcagcacctgctgaagctgaccgtgtggggcatcaagcagctgcaggcccgcgtgctggccgtggagcgctacctgcgcgaccagcagctgctgggcatctggggctgctccggcaagctgatctgctgcaccaacgtgccctggaactcctcctggtccaaccgcaacctgtccgagatctgggacaacatgacctggctgcagtgggacaaggagatctccaactacacccagatcatctacggcctgctggaggagtcccagaaccagcaggagaagaacgagcaggacctgctggccctggactag

SEQ ID NO: 206 - DNA, 1944 bp, Artificial Sequence
  Description of Artificial Sequence: Synthetic polynucleotide
atgcccatgggctccctgcagcccctggccaccctgtacctgctgggcatgctggtggcctccgtgctggccgccgagaacctgtgggtgaccgtgtactacggcgtgcccgtgtggaaggaggccaagaccaccctgttctgcgcctccgacgccaaggcctacgagaaggaggtgcgcaacgtgtgggccacccacgcctgcgtgcccaccgaccccaacccccaggagatggtgctgaagaacgtgaccgagaacttcaacatgtggaagaacgacatggtggaccagatgcacgaggacgtgatctccctgtgggaccagtccctgaagccctgcgtgaagctgacccccctgtgcgtgaccctgaactgcaccaacgccaccgcctccaactcctccatcatcgagggcatgaagaactgctccttcaacatcaccaccgagctgcgcgacaagcgcgagaagaagaacgccctgttctacaagctggacatcgtgcagctggacggcaactcctcccagtaccgcctgatcaactgcaacacctccgtgatcacccaggcctgccccaaggtgtccttcgaccccatccccatccactactgcgcccccgccggctacgccatcctgaagtgcaacaacaagaccttcaccggcaccggcccctgcaacaacgtgtccaccgtgcagtgcacccacggcatcaagcccgtggtgtccacccagctgctgctgaacggctccctggccgagggcgagatcatcatccgctccgagaacatcaccgacaacggcaagaccatcatcgtgcacctgaacgagtccgtgaagatcgagtgcacccgccccaacaacaagacccgcacctccatccgcatcggccccggccagtggttctacgccaccggccaggtgatcggcgacatccgcgaggcctactgcaacatcaacgagtccaagtggaacgagaccctgcagcgcgtgtccaagaagctgaaggagtacttcccccacaagaacatcaccttccagccctcctccggcggcgacctggagatcaccacccactccttcaactgcggcggcgagttcttctactgcaacacctcctccctgttcaaccgcacctacatggccaactccaccgacatggccaactccaccgagaccaactccacccgcaccatcaccatccactgccgcatcaagcagatcatcaacatgtggcaggaggtgggccgcgccatgtacgccccccccatcgccggcaacatcacctgcatctccaacatcaccggcctgctgctgacccgcgacggcggcaagaacaacaccgagaccttccgccccggcggcggcaacatgaaggacaactggcgctccgagctgtacaagtacaaggtggtgaagatcgagcccctgggcgtggcccccacccgctgcaagcgccgcgtggtgggccgccgccgccgccgccgcgccgtgggcatcggcgccgtgttcctgggcttcctgggcgccgccggctccaccatgggcgccgcctccatgaccctgaccgtgcaggcccgcaacctgctgtccggcatcgtgcagcagcagtccaacctgctgcgcgcccccgaggcccagcagcacctgctgaagctgaccgtgtggggcatcaagcagctgcaggcccgcgtgctggccgtggagcgctacctgcgcgaccagcagctgctgggcatctggggctgctccggcaagctgatctgctgcaccaacgtgccctggaactcctcctggtccaaccgcaacctgtccgagatctgggacaacatgacctggctgcagtgggacaaggagatctccaactacacccagatcatctacggcctgctggaggagtcccagaaccagcaggagaagaacgagcaggacctgctggccctggactag

SEQ ID NO: 207 - DNA, 1983 bp, Artificial Sequence
  Description of Artificial Sequence: Synthetic polynucleotide
atgcccatgggctccctgcagcccctggccaccctgtacctgctgggcatgctggtggcctccgtgctggccgccgagaacctgtgggtgaccgtgtactacggcgtgcccgtgtggaaggaggccaagaccaccctgttctgcgcctccgacgccaaggcctacgagaagaaggtgcacaacgtgtgggccacccacgcctgcgtgcccaccgaccccaacccccaggagatggtgctgaagaacgtgaccgagaacttcaacatgtggaagaacgacatggtggaccagatgcacgaggacgtgatctccctgtgggaccagtccctgaagccctgcgtgaagctgacccccctgtgcgtgaccctgaactgcaccaacgccaacgccaccgcctccaactcctccatcatcgagggcatgaactcctccatcatcgagggcatgaagaactgctccttcaacatcaccaccgagctgcgcgacaagcgcgagaagaagaacgccctgttctacaagctggacatcgtgcagctggacggcaactcctcccagtaccgcctgatcaactgcaacacctccgtgatcacccaggcctgccccaaggtgtccttcgaccccatccccatccactactgcgcccccgccggctacgccatcctgaagtgcaacaacaagaccttcaacggcaccggcccctgcaacaacgtgtccaccgtgcagtgcacccacggcatcaagcccgtggtgtccacccagctgctgctgaacggctccctggccgagggcgagatcatcatccgctccgagaacatcaccgacaacggcaagaccatcatcgtgcacctgaacgagtccgtgaagatcgagtgcacccgcccctccaacaacacccgcacctccatccgcatcggccccggccagtggttctacgccaccggccaggtgatcggcgacatccgcgaggcccactgcaacatctccgagtccaagtggaacgagaccctgcagcgcgtgtccgagaagctgaaggagtacttcccccacaagaacatcaccttccagccctcctccggcggcgacctggagatcaccacccactccttcaactgcggcggcgagttcttctactgcaacacctcctccctgttcaaccgcacctacatggccacctccaccgacatggccaactccaccgagaccaactccacccgcatcatcaccatccgctgccgcatcaagcagatcatcaacatgtggcaggaggtgggccgcgccatgtacgccccccccatcgccggcaacatcacctgcatctccaacatcaccggcctgctgctgacccgcgacggcggcaagaacaacaccgagaccttcgagaccttccgccccggcggcggcaacatgaaggacaactggcgctccgagctgtacaagtacaaggtggtgaagatcgagcccctgggcgtggcccccacccgctgcaagcgccgcgtggtgggccgccgccgccgccgccgcgccgtgggcatcggcgccgtgttcctgggcttcctgggcgccgccggctccaccatgggcgccgcctccatgaccctgaccgtgcaggcccgcaacctgctgtccggcatcgtgcagcagcagtccaacctgctgcgcgcccccgaggcccagcagcacctgctgaagctgaccgtgtggggcatcaagcagctgcaggcccgcgtgctggccgtggagcgctacctgcgcgaccagcagctgctgggcatctggggctgctccggcaagctgatctgctgcaccaacgtgccctggaactcctcctggtccaaccgcaacctgtccgagatctgggacaacatgacctggctgcagtgggacaaggagatctccaactacacccagatcatctacggcctgctggaggagtcccagaaccagcaggagaagaacgagcaggacctgctggccctggactag

SEQ ID NO: 208 - DNA, 1983 bp, Artificial Sequence
  Description of Artificial Sequence: Synthetic polynucleotide
atgcccatgggctccctgcagcccctggccaccctgtacctgctgggcatgctggtggcctccgtgctggccgccgagaacctgtgggtgaccgtgtactacggcgtgcccgtgtggaaggaggccaagaccaccctgttctgcgcctccgacgccaaggcctacgagaaggaggtgcgcaacgtgtgggccacccacgcctgcgtgcccaccgaccccaacccccaggagatggtgctgaagaacgtgaccgagaacttcaacatgtggaagaacgacatggtggaccagatgcacgaggacgtgatctccctgtgggaccagtccctgaagccctgcgtgaagctgacccccctgtgcgtgaccctgaactgcaccaacgccaacgccaccgcctccaactcctccatcatcgagggcatgaactcctccatcatcgagggcatgaagaactgctccttcaacatcaccaccgagctgcgcgacaagcgcgagaagaagaacgccctgttctacaagctggacatcgtgcagctggacggcaactcctcccagtaccgcctgatcaactgcaacacctccgtgatcacccaggcctgccccaaggtgtccttcgaccccatccccatccactactgcgcccccgccggctacgccatcctgaagtgcaacaacaagaccttcaacggcaccggcccctgcaacaacgtgtccaccgtgcagtgcacccacggcatcaagcccgtggtgtccacccagctgctgctgaacggctccctggccgagggcgagatcatcatccgctccgagaacatcaccgacaacggcaagaccatcatcgtgcacctgaacgagtccgtgaagatcgagtgcacccgcccctccaacaacacccgcacctccatccgcatcggccccggccagtggttctacgccaccggccaggtgatcggcgacatccgcgaggcccactgcaacatctccgagtccaagtggaacgagaccctgcagcgcgtgtccgagaagctgaaggagtacttcccccacaagaacatcaccttccagccctcctccggcggcgacctggagatcaccacccactccttcaactgcggcggcgagttcttctactgcaacacctcctccctgttcaaccgcacctacatggccacctccaccgacatggccaactccaccgagaccaactccacccgcatcatcaccatccgctgccgcatcaagcagatcatcaacatgtggcaggaggtgggccgcgccatgtacgccccccccatcgccggcaacatcacctgcatctccaacatcaccggcctgctgctgacccgcgacggcggcaagaacaacaccgagaccttcgagaccttccgccccggcggcggcaacatgaaggacaactggcgctccgagctgtacaagtacaaggtggtgaagatcgagcccctgggcgtggcccccacccgctgcaagcgccgcgtggtgggccgccgccgccgccgccgcgccgtgggcatcggcgccgtgttcctgggcttcctgggcgccgccggctccaccatgggcgccgcctccatgaccctgaccgtgcaggcccgcaacctgctgtccggcatcgtgcagcagcagtccaacctgctgcgcgcccccgaggcccagcagcacctgctgaagctgaccgtgtggggcatcaagcagctgcaggcccgcgtgctggccgtggagcgctacctgcgcgaccagcagctgctgggcatctggggctgctccggcaagctgatctgctgcaccaacgtgccctggaactcctcctggtccaaccgcaacctgtccgagatctgggacaacatgacctggctgcagtgggacaaggagatctccaactacacccagatcatctacggcctgctggaggagtcccagaaccagcaggagaagaacgagcaggacctgctggccctggactag

SEQ ID NO: 209 - DNA, 1950 bp, Artificial Sequence
  Description of Artificial Sequence: Synthetic polynucleotide
atgcccatgggctccctgcagcccctggccaccctgtacctgctgggcatgctggtggcctccgtgctggccgccgagaacctgtgggtgaccgtgtactacggcgtgcccgtgtggaaggaggccaagaccaccctgttctgcgcctccgacgccaaggcctacgagaagaaggtgcacaacgtgtgggccacccacgcctgcgtgcccaccgaccccaacccccaggagatggtgctgaagaacgtgaccgagaacttcaacatgtggaagaacgacatggccgaccagatgcacgaggacgtgatctccctgtgggaccagtccctgaagccctgcgtgaagctgacccccctgtgcgtgaccctgaactgcatcgacgccaacgccaccgcctccaacgccaccgcctccaactcctccatcatcgagggcatgaagaactgctccttcaacatcaccaccgagctgcgcgacaagatcgagaagaagaacgccctgttctacaagctggacatcgtgcagctggacggcaactcctcccagtaccgcctgatcaactgcaacacctccgtgatcacccaggcctgccccaaggtgtccttcgaccccatccccatccactactgcgcccccgccggctacgccatcctgaagtgcaacaacaagaccttcaacggcaccggcccctgcaacaacgtgtccaccgtgcagtgcacccacggcatcaagcccgtggtgtccacccagctgctgctgaacggctccctggccgagggcgagatcatcatccgctccgagaacatcaccaactccgccaagaccatcatcgtgcacctgaacgagtccgtgaagatcgagtgcacccgcccctccaacaacacccgcacctccatccgcatcggccccggccagtggttctacgccaccggccaggtgatcggcgacatccgcaaggcccactgcaacatctccgagtccaagtggaacgagaccctgcagcgcgtgtccaagaagctgaaggagtacttcccccacaagaacatcaccttccagccctcctccggcggcgacctggagatcaccacccactccttcaactgcggcggcgagttcttctactgcaacacctcctccctgttcaaccgcacctacatggccaactccaccgagaccaactccacccgcaccatcaccctgcactgccgcatcaagcagatcatcaacatgtggcaggaggtgggccgcgccatgtacgccccccccatcgccggcaacatcacctgcatctccaacatcaccggcctgctgctgacccgcgacggcggcaacaacaacaccaccgagaccttccgccccggcggcggcaacatgaaggacaactggcgctccgagctgtacaagtacaaggtggtgaagatcgagcccctgggcgtggcccccacccgctgcaagcgccgcgtggtgggccgccgccgccgccgccgcgccgtgggcatcggcgccgtgttcctgggcttcctgggcgccgccggctccaccatgggcgccgcctccatgaccctgaccgtgcaggcccgcaacctgctgtccggcatcgtgcagcagcagtccaacctgctgcgcgcccccgaggcccagcagcacctgctgaagctgaccgtgtggggcatcaagcagctgcaggcccgcgtgctggccgtggagcgctacctgcgcgaccagcagctgctgggcatctggggctgctccggcaagctgatctgctgcaccaacgtgccctggaactcctcctggtccaaccgcaacctgtccgagatctgggacaacatgacctggctgcagtgggacaaggagatctccaactacacccagatcatctacggcctgctggaggagtcccagaaccagcaggagaagaacgagcaggacctgctggccctggactag

SEQ ID NO: 210 - DNA, 1950 bp, Artificial Sequence
  Description of Artificial Sequence: Synthetic polynucleotide
atgcccatgggctccctgcagcccctggccaccctgtacctgctgggcatgctggtggcctccgtgctggccgccgagaacctgtgggtgaccgtgtactacggcgtgcccgtgtggaaggaggccaagaccaccctgttctgcgcctccgacgccaaggcctacgagaaggaggtgcgcaacgtgtgggccacccacgcctgcgtgcccaccgaccccaacccccaggagatggtgctgaagaacgtgaccgagaacttcaacatgtggaagaacgacatggccgaccagatgcacgaggacgtgatctccctgtgggaccagtccctgaagccctgcgtgaagctgacccccctgtgcgtgaccctgaactgcatcgacgccaacgccaccgcctccaacgccaccgcctccaactcctccatcatcgagggcatgaagaactgctccttcaacatcaccaccgagctgcgcgacaagatcgagaagaagaacgccctgttctacaagctggacatcgtgcagctggacggcaactcctcccagtaccgcctgatcaactgcaacacctccgtgatcacccaggcctgccccaaggtgtccttcgaccccatccccatccactactgcgcccccgccggctacgccatcctgaagtgcaacaacaagaccttcaacggcaccggcccctgcaacaacgtgtccaccgtgcagtgcacccacggcatcaagcccgtggtgtccacccagctgctgctgaacggctccctggccgagggcgagatcatcatccgctccgagaacatcaccaactccgccaagaccatcatcgtgcacctgaacgagtccgtgaagatcgagtgcacccgcccctccaacaacacccgcacctccatccgcatcggccccggccagtggttctacgccaccggccaggtgatcggcgacatccgcaaggcccactgcaacatctccgagtccaagtggaacgagaccctgcagcgcgtgtccaagaagctgaaggagtacttcccccacaagaacatcaccttccagccctcctccggcggcgacctggagatcaccacccactccttcaactgcggcggcgagttcttctactgcaacacctcctccctgttcaaccgcacctacatggccaactccaccgagaccaactccacccgcaccatcaccctgcactgccgcatcaagcagatcatcaacatgtggcaggaggtgggccgcgccatgtacgccccccccatcgccggcaacatcacctgcatctccaacatcaccggcctgctgctgacccgcgacggcggcaacaacaacaccaccgagaccttccgccccggcggcggcaacatgaaggacaactggcgctccgagctgtacaagtacaaggtggtgaagatcgagcccctgggcgtggcccccacccgctgcaagcgccgcgtggtgggccgccgccgccgccgccgcgccgtgggcatcggcgccgtgttcctgggcttcctgggcgccgccggctccaccatgggcgccgcctccatgaccctgaccgtgcaggcccgcaacctgctgtccggcatcgtgcagcagcagtccaacctgctgcgcgcccccgaggcccagcagcacctgctgaagctgaccgtgtggggcatcaagcagctgcaggcccgcgtgctggccgtggagcgctacctgcgcgaccagcagctgctgggcatctggggctgctccggcaagctgatctgctgcaccaacgtgccctggaactcctcctggtccaaccgcaacctgtccgagatctgggacaacatgacctggctgcagtgggacaaggagatctccaactacacccagatcatctacggcctgctggaggagtcccagaaccagcaggagaagaacgagcaggacctgctggccctggactag

SEQ ID NO: 211 - DNA, 1995 bp, Artificial Sequence
  Description of Artificial Sequence: Synthetic polynucleotide
atgcccatgggctccctgcagcccctggccaccctgtacctgctgggcatgctggtggcctccgtgctggccgccgagaacctgtgggtgaccgtgtactacggcgtgcccgtgtggaaggaggccaagaccaccctgttctgcgcctccgacgccaaggcctacgagaagaaggtgcacaacgtgtgggccacccacgcctgcgtgcccaccgaccccaacccccaggagatggtgctggagaacgtgaccgagaacttcaacatgtggaagaacgacatggccgaccagatgcacgaggacgtgatctccctgtgggaccagtccctgaagccctgcgtgaagctgacccccctgtgcgtgaccctgaactgcaccgacgccaacgccaccgcctccaacaccaacgccaccgcctccaacatcaacgccaccgcctccaagtcctccatcatcgaggagatgaagaactgctccttcaacatcaccaccgagctgcgcgacaagcgcgagaagaagtacgccctgttctacaagctggacatcgtgcagctggacggcaactcctcccagtaccgcctgatcaactgcaacacctccgtgatcacccaggcctgccccaaggtgtccttcgaccccatccccatccactactgcgcccccgccggctacgccatcctgaagtgcaacaacaagaccttcaacggcaccggcccctgcaacaacgtgtccaccgtgcagtgcacccacggcatcaagcccgtggtgtccacccagctgctgctgaacggctccctggccgagggcgagatcatcatccgctccgagaacatcaccgacaactccaagaccatcatcgtgcacctgaacgagtccgtgaagatcgagtgcacccgcccctccaacaacacccgcacctccatccgcatcggccccggccagtggttctacgccaccggccaggtgatcggcgacatccgcgaggcccactgcaacatctccgagtccaagtggaacgagaccctgcagcgcgtgtccaagaagctgaaggagtacttccccgacaagaacatcaccttccagccctcctccggcggcgaccccgagatcaccacccactccttcaactgcggcggcgagttcttctactgcaacacctcctccctgttcaaccgcacctacatggccaactccaccgagaccaactccacccgcaccatcaccctgcactgccgcatcaagcagatcatcaacatgtggcaggaggtgggccgcgccatgtacgccccccccatcgccggcaacatcacctgcatctccaacatcaccggcctgctgctgacccgcgacggcggcgagaacacccgcgacggcggcaacaacaacaccgagaccttccgccccgagggcggcaacatgaaggacaactggcgctccgagctgtacaagtacaaggtggtgaagatcgagcccctgggcgtggcccccacccgctgcaagcgccgcgtggtgggccgccgccgccgccgccgcgccgtgggcatcggcgccgtgttcctgggcttcctgggcgccgccggctccaccatgggcgccgcctccatgaccctgaccgtgcaggcccgcaacctgctgtccggcatcgtgcagcagcagtccaacctgctgcgcgcccccgaggcccagcagcacctgctgaagctgaccgtgtggggcatcaagcagctgcaggcccgcgtgctggccgtggagcgctacctgcgcgaccagcagctgctgggcatctggggctgctccggcaagctgatctgctgcaccaacgtgccctggaactcctcctggtccaaccgcaacctgtccgagatctgggacaacatgacctggctgcagtgggacaaggagatctccaactacacccagatcatctacggcctgctggaggagtcccagaaccagcaggagaagaacgagcaggacctgctggccctggactag

SEQ ID NO: 212 - DNA, 1995 bp, Artificial Sequence
  Description of Artificial Sequence: Synthetic polynucleotide
atgcccatgggctccctgcagcccctggccaccctgtacctgctgggcatgctggtggcctccgtgctggccgccgagaacctgtgggtgaccgtgtactacggcgtgcccgtgtggaaggaggccaagaccaccctgttctgcgcctccgacgccaaggcctacgagaaggaggtgcgcaacgtgtgggccacccacgcctgcgtgcccaccgaccccaacccccaggagatggtgctggagaacgtgaccgagaacttcaacatgtggaagaacgacatggccgaccagatgcacgaggacgtgatctccctgtgggaccagtccctgaagccctgcgtgaagctgacccccctgtgcgtgaccctgaactgcaccgacgccaacgccaccgcctccaacaccaacgccaccgcctccaacatcaacgccaccgcctccaagtcctccatcatcgaggagatgaagaactgctccttcaacatcaccaccgagctgcgcgacaagcgcgagaagaagtacgccctgttctacaagctggacatcgtgcagctggacggcaactcctcccagtaccgcctgatcaactgcaacacctccgtgatcacccaggcctgccccaaggtgtccttcgaccccatccccatccactactgcgcccccgccggctacgccatcctgaagtgcaacaacaagaccttcaacggcaccggcccctgcaacaacgtgtccaccgtgcagtgcacccacggcatcaagcccgtggtgtccacccagctgctgctgaacggctccctggccgagggcgagatcatcatccgctccgagaacatcaccgacaactccaagaccatcatcgtgcacctgaacgagtccgtgaagatcgagtgcacccgcccctccaacaacacccgcacctccatccgcatcggccccggccagtggttctacgccaccggccaggtgatcggcgacatccgcgaggcccactgcaacatctccgagtccaagtggaacgagaccctgcagcgcgtgtccaagaagctgaaggagtacttccccgacaagaacatcaccttccagccctcctccggcggcgaccccgagatcaccacccactccttcaactgcggcggcgagttcttctactgcaacacctcctccctgttcaaccgcacctacatggccaactccaccgagaccaactccacccgcaccatcaccctgcactgccgcatcaagcagatcatcaacatgtggcaggaggtgggccgcgccatgtacgccccccccatcgccggcaacatcacctgcatctccaacatcaccggcctgctgctgacccgcgacggcggcgagaacacccgcgacggcggcaacaacaacaccgagaccttccgccccgagggcggcaacatgaaggacaactggcgctccgagctgtacaagtacaaggtggtgaagatcgagcccctgggcgtggcccccacccgctgcaagcgccgcgtggtgggccgccgccgccgccgccgcgccgtgggcatcggcgccgtgttcctgggcttcctgggcgccgccggctccaccatgggcgccgcctccatgaccctgaccgtgcaggcccgcaacctgctgtccggcatcgtgcagcagcagtccaacctgctgcgcgcccccgaggcccagcagcacctgctgaagctgaccgtgtggggcatcaagcagctgcaggcccgcgtgctggccgtggagcgctacctgcgcgaccagcagctgctgggcatctggggctgctccggcaagctgatctgctgcaccaacgtgccctggaactcctcctggtccaaccgcaacctgtccgagatctgggacaacatgacctggctgcagtgggacaaggagatctccaactacacccagatcatctacggcctgctggaggagtcccagaaccagcaggagaagaacgagcaggacctgctggccctggactag

SEQ ID NO: 213 - DNA, 1980 bp, Artificial Sequence
  Description of Artificial Sequence: Synthetic polynucleotide
atgcccatgggctccctgcagcccctggccaccctgtacctgctgggcatgctggtggcctccgtgctggccgccgagaacctgtgggtgaccgtgtactacggcgtgcccgtgtggaaggaggccaagaccaccctgttctgcgcctccgacgccaaggcctacgagaagaaggtgcacaacgtgtgggccacccacgcctgcgtgcccaccgaccccaacccccaggagatggtgctgaagaacgtgaccgagaacttcaacatgtggaagaacgacatggtggaccagatgcacgaggacgtgatctccctgtgggaccagtccctgaccccctgcgtgaagctgacccccctgtgcgtgaccctgaactgcaccgacgccaacgacaccgcctccaactcctccatcatcaagggcatgaacaactccatcgtgggcgagatgaagaactgctccttcaacatcaccaccgagctgcgcgacaagcgcgagaagaagaacgccctgttctacaagctggacatcgtgcagctggacggcaactcctccgagtaccgcctgatcaactgcaacacctccgtgatcacccaggcctgccccaaggtgtccttcgaccccatccccatccactactgcgcccccgccggctacgccatcctgaagtgcaacaacaagaccttcaacggcaccggcccctgcaacaacgtgtccaccgtgcagtgcacccacggcatcaagcccgtggtgtccacccagctgctgctgaacggctccctggccgagggcgagatcatcatccgctccgagaacatcaccgacaacgccaagaccatcatcgtgcacctgaacgagtccgtgaagatcgagtgcacccgcccctccaacaacacccgcacctccatccgcatcggccccggccagtggttctacgccaccggccaggtgatcggcgacatccgcaaggcccactgcaacatctccgagtccaagtggaacgagaccctgcagcgcgtgtccaagaagctgaaggagtacttccccgacaagaacatcaccttccagccctcctccggcggcgaccccgagatcaccacccactccttcaactgcggcggcgagttcttctactgcaacacctcctccctgttcaaccgcacctacatggccaactccaccgacatggccaactccgccgagaccaactccacccgcaccatcaccctgcactgccgcatcaagcagatcatcaacatgtggcaggaggtgggccgcgccatgtacgccccccccatcgccggcaacatcacctgcatctccaacatcaccggcctgctgctgacccgcgacggcggcaactcctccaccgagaccgagaccttccgccccggcggcggcaacatgaaggacaactggcgctccgagctgtacaagtacaaggtggtgaagatcgagcccctgggcgtggcccccacccgctgcaagcgccgcgtggtgggccgccgccgccgccgccgcgccgtgggcatcggcgccgtgttcctgggcttcctgggcgccgccggctccaccatgggcgccgcctccatgaccctgaccgtgcaggcccgcaacctgctgtccggcatcgtgcagcagcagtccaacctgctgcgcgcccccgaggcccagcagcacctgctgaagctgaccgtgtggggcatcaagcagctgcaggcccgcgtgctggccgtggagcgctacctgcgcgaccagcagctgctgggcatctggggctgctccggcaagctgatctgctgcaccaacgtgccctggaactcctcctggtccaaccgcaacctgtccgagatctgggacaacatgacctggctgcagtgggacaaggagatctccaactacacccagatcatctacggcctgctggaggagtcccagaaccagcaggagaagaacgagcaggacctgctggccctggactag

SEQ ID NO: 214 - DNA, 1980 bp, Artificial Sequence
  Description of Artificial Sequence: Synthetic polynucleotide
atgcccatgggctccctgcagcccctggccaccctgtacctgctgggcatgctggtggcctccgtgctggccgccgagaacctgtgggtgaccgtgtactacggcgtgcccgtgtggaaggaggccaagaccaccctgttctgcgcctccgacgccaaggcctacgagaaggaggtgcgcaacgtgtgggccacccacgcctgcgtgcccaccgaccccaacccccaggagatggtgctgaagaacgtgaccgagaacttcaacatgtggaagaacgacatggtggaccagatgcacgaggacgtgatctccctgtgggaccagtccctgaccccctgcgtgaagctgacccccctgtgcgtgaccctgaactgcaccgacgccaacgacaccgcctccaactcctccatcatcaagggcatgaacaactccatcgtgggcgagatgaagaactgctccttcaacatcaccaccgagctgcgcgacaagcgcgagaagaagaacgccctgttctacaagctggacatcgtgcagctggacggcaactcctccgagtaccgcctgatcaactgcaacacctccgtgatcacccaggcctgccccaaggtgtccttcgaccccatccccatccactactgcgcccccgccggctacgccatcctgaagtgcaacaacaagaccttcaacggcaccggcccctgcaacaacgtgtccaccgtgcagtgcacccacggcatcaagcccgtggtgtccacccagctgctgctgaacggctccctggccgagggcgagatcatcatccgctccgagaacatcaccgacaacgccaagaccatcatcgtgcacctgaacgagtccgtgaagatcgagtgcacccgcccctccaacaacacccgcacctccatccgcatcggccccggccagtggttctacgccaccggccaggtgatcggcgacatccgcaaggcccactgcaacatctccgagtccaagtggaacgagaccctgcagcgcgtgtccaagaagctgaaggagtacttccccgacaagaacatcaccttccagccctcctccggcggcgaccccgagatcaccacccactccttcaactgcggcggcgagttcttctactgcaacacctcctccctgttcaaccgcacctacatggccaactccaccgacatggccaactccgccgagaccaactccacccgcaccatcaccctgcactgccgcatcaagcagatcatcaacatgtggcaggaggtgggccgcgccatgtacgccccccccatcgccggcaacatcacctgcatctccaacatcaccggcctgctgctgacccgcgacggcggcaactcctccaccgagaccgagaccttccgccccggcggcggcaacatgaaggacaactggcgctccgagctgtacaagtacaaggtggtgaagatcgagcccctgggcgtggcccccacccgctgcaagcgccgcgtggtgggccgccgccgccgccgccgcgccgtgggcatcggcgccgtgttcctgggcttcctgggcgccgccggctccaccatgggcgccgcctccatgaccctgaccgtgcaggcccgcaacctgctgtccggcatcgtgcagcagcagtccaacctgctgcgcgcccccgaggcccagcagcacctgctgaagctgaccgtgtggggcatcaagcagctgcaggcccgcgtgctggccgtggagcgctacctgcgcgaccagcagctgctgggcatctggggctgctccggcaagctgatctgctgcaccaacgtgccctggaactcctcctggtccaaccgcaacctgtccgagatctgggacaacatgacctggctgcagtgggacaaggagatctccaactacacccagatcatctacggcctgctggaggagtcccagaaccagcaggagaagaacgagcaggacctgctggccctggactag

SEQ ID NO: 215 - DNA, 1944 bp, Artificial Sequence
  Description of Artificial Sequence: Synthetic polynucleotide
atgcccatgggctccctgcagcccctggccaccctgtacctgctgggcatgctggtggcctccgtgctggccgccgagaacctgtgggtgaccgtgtactacggcgtgcccgtgtggaaggaggccaagaccaccctgttctgcgcctccgacgccaaggcctacgagaagaaggtgcacaacgtgtgggccacccacgcctgcgtgcccaccgaccccaacccccaggagatggtgctgaagaacgtgaccgagaacttcaacatgtggaagaacgacatggtggaccagatgcacgaggacgtgatctccctgtgggaccagtccctgaagccctgcgtgaagctgacccccctgtgcgtgaccctgaactgcaccaacgccaccgcctccaacaactccatcatcgagggcatgaagaactgctccttcaacatcaccaccgagctgcgcgacaagcgcgagaagaagaacgccctgttctacaagctggacatcgtgcagctggacggcaactcctcccagtaccgcctgatcaactgcaacacctccgtgatcacccaggcctgccccaaggtgtccttcgaccccatccccatccactactgcgcccccgccggctacgccatcctgaagtgcaacaacaagaccttcaccggcaccggcccctgcaacaacgtgtccaccgtgcagtgcacccacggcatcaagcccgtggtgtccacccagctgctgctgaacggctccctggccgagggcgagatcatcatccgctccgagaacatcaccaacaacgccaagaccatcatcgtgcacctgaacgagtccgtgaagatcgagtgcacccgccccaacaacaagacccgcacctccatccgcatcggccccggccagtggttctacgccaccggccaggtgatcggcgacatccgcaaggcctactgcaacatctccgagtccaagtggaacgagaccctgcagcgcgtgtccaagaagctgaaggagtacttcccccacaagaacatcaccttccagccctcctccggcggcgacctggagatcaccacccactccttcaactgcggcggcgagttcttctactgcaacacctcctccctgttcaaccgcacctacatggccaactccaccgacatggccaactccaccgagaccaactccacccgcaccatcaccctgcactgccgcatcaagcagatcatcaacatgtggcaggaggtgggccgcgccatgtacgccccccccatcgccggcaacatcacctgcatctccaacatcaccggcctgctgctgacccgcgacggcggcaagaacaacaccgagaccttccgccccggcggcggcaacatgaaggacaactggcgctccgagctgtacaagtacaaggtggtgaagatcgagcccctgggcgtggcccccacccgctgcaagcgccgcgtggtgggccgccgccgccgccgccgcgccgtgggcatcggcgccgtgttcctgggcttcctgggcgccgccggctccaccatgggcgccgcctccatgaccctgaccgtgcaggcccgcaacctgctgtccggcatcgtgcagcagcagtccaacctgctgcgcgcccccgaggcccagcagcacctgctgaagctgaccgtgtggggcatcaagcagctgcaggcccgcgtgctggccgtggagcgctacctgcgcgaccagcagctgctgggcatctggggctgctccggcaagctgatctgctgcaccaacgtgccctggaactcctcctggtccaaccgcaacctgtccgagatctgggacaacatgacctggctgcagtgggacaaggagatctccaactacacccagatcatctacggcctgctggaggagtcccagaaccagcaggagaagaacgagcaggacctgctggccctggactag

SEQ ID NO: 216 - DNA, 1944 bp, Artificial Sequence
  Description of Artificial Sequence: Synthetic polynucleotide
atgcccatgggctccctgcagcccctggccaccctgtacctgctgggcatgctggtggcctccgtgctggccgccgagaacctgtgggtgaccgtgtactacggcgtgcccgtgtggaaggaggccaagaccaccctgttctgcgcctccgacgccaaggcctacgagaaggaggtgcgcaacgtgtgggccacccacgcctgcgtgcccaccgaccccaacccccaggagatggtgctgaagaacgtgaccgagaacttcaacatgtggaagaacgacatggtggaccagatgcacgaggacgtgatctccctgtgggaccagtccctgaagccctgcgtgaagctgacccccctgtgcgtgaccctgaactgcaccaacgccaccgcctccaacaactccatcatcgagggcatgaagaactgctccttcaacatcaccaccgagctgcgcgacaagcgcgagaagaagaacgccctgttctacaagctggacatcgtgcagctggacggcaactcctcccagtaccgcctgatcaactgcaacacctccgtgatcacccaggcctgccccaaggtgtccttcgaccccatccccatccactactgcgcccccgccggctacgccatcctgaagtgcaacaacaagaccttcaccggcaccggcccctgcaacaacgtgtccaccgtgcagtgcacccacggcatcaagcccgtggtgtccacccagctgctgctgaacggctccctggccgagggcgagatcatcatccgctccgagaacatcaccaacaacgccaagaccatcatcgtgcacctgaacgagtccgtgaagatcgagtgcacccgccccaacaacaagacccgcacctccatccgcatcggccccggccagtggttctacgccaccggccaggtgatcggcgacatccgcaaggcctactgcaacatctccgagtccaagtggaacgagaccctgcagcgcgtgtccaagaagctgaaggagtacttcccccacaagaacatcaccttccagccctcctccggcggcgacctggagatcaccacccactccttcaactgcggcggcgagttcttctactgcaacacctcctccctgttcaaccgcacctacatggccaactccaccgacatggccaactccaccgagaccaactccacccgcaccatcaccctgcactgccgcatcaagcagatcatcaacatgtggcaggaggtgggccgcgccatgtacgccccccccatcgccggcaacatcacctgcatctccaacatcaccggcctgctgctgacccgcgacggcggcaagaacaacaccgagaccttccgccccggcggcggcaacatgaaggacaactggcgctccgagctgtacaagtacaaggtggtgaagatcgagcccctgggcgtggcccccacccgctgcaagcgccgcgtggtgggccgccgccgccgccgccgcgccgtgggcatcggcgccgtgttcctgggcttcctgggcgccgccggctccaccatgggcgccgcctccatgaccctgaccgtgcaggcccgcaacctgctgtccggcatcgtgcagcagcagtccaacctgctgcgcgcccccgaggcccagcagcacctgctgaagctgaccgtgtggggcatcaagcagctgcaggcccgcgtgctggccgtggagcgctacctgcgcgaccagcagctgctgggcatctggggctgctccggcaagctgatctgctgcaccaacgtgccctggaactcctcctggtccaaccgcaacctgtccgagatctgggacaacatgacctggctgcagtgggacaaggagatctccaactacacccagatcatctacggcctgctggaggagtcccagaaccagcaggagaagaacgagcaggacctgctggccctggactag

SEQ ID NO: 217 - DNA, 1953 bp, Artificial Sequence
  Description of Artificial Sequence: Synthetic polynucleotide
atgcccatgggctccctgcagcccctggccaccctgtacctgctgggcatgctggtggcctccgtgctggccgccgagaacctgtgggtgaccgtgtactacggcgtgcccgtgtggaaggaggccaagaccaccctgttctgcgcctccgacgccaaggcctacgagaagaaggtgcacaacgtgtgggccacccacgcctgcgtgcccaccgaccccaacccccaggagatggtgctgaagaacgtgaccgagaacttcaacatgtggaagaacgacatggtggaccagatgcacgaggacgtgatctccctgtgggaccagtccctgaagccctgcgtgaagctgacccccctgtgcgtgaccctgaactgcaccaacgccaccaacgccaccgcctccaactcctccatcatcgagggcatgaagaactgctccttcaacatcaccaccgagctgcgcgacaagcgcgagaagaagaacgccctgttctacaagctggacatcgtgcagctggacggcaactcctcccagtaccgcctgatcaactgcaacacctccgtgatcacccaggcctgccccaaggtgtccttcgaccccatccccatccactactgcgcccccgccggctacgccatcctgaagtgcaacaacaagaccttcaccggcaccggcccctgcaacaacgtgtccaccgtgcagtgcacccacggcatcaagcccgtggtgtccacccagctgctgctgaacggctccctggccgagggcgagatcatcatccgctccgagaacatcaccaacaacgacaagaccatcatcgtgcacctgaacgagtccgtgaagatcgagtgcacccgcccctccaacaagacccgcacctccatccgcatcggccccggccagtggttctacgccaccggccaggtgatcggcgacatccgcgaggcctactgcaacatctccgagtccaagtggaacgagaccctgcagcgcgtgtccaagaagctgaaggagtacttcccccacaagaacatcaccttccagccctcctccggcggcgacctggagatcaccacccactccttcaactgcggcggcgagttcttctactgcaacacctcctccctgttcaaccgcacctacatggccaactccaccgacatggccaactccaccgagaccaactccacccgcaacatcaccatccactgccgcatcaagcagatcatcaacatgtggcaggaggtgggccgcgccatgtacgccccccccatcgccggcaacatcacctgcatctccaacatcaccggcctgctgctgacccgcgacggcggcaagaacgacaccgagaccttccgccccggcggcggcaacatgaaggacaactggcgctccgagctgtacaagtacaaggtggtgaagatcgagcccctgggcgtggcccccacccgctgcaagcgccgcgtggtgggccgccgccgccgccgccgcgccgtgggcatcggcgccgtgttcctgggcttcctgggcgccgccggctccaccatgggcgccgcctccatgaccctgaccgtgcaggcccgcaacctgctgtccggcatcgtgcagcagcagtccaacctgctgcgcgcccccgaggcccagcagcacctgctgaagctgaccgtgtggggcatcaagcagctgcaggcccgcgtgctggccgtggagcgctacctgcgcgaccagcagctgctgggcatctggggctgctccggcaagctgatctgctgcaccaacgtgccctggaactcctcctggtccaaccgcaacctgtccgagatctgggacaacatgacctggctgcagtgggacaaggagatctccaactacacccagatcatctacggcctgctggaggagtcccagaaccagcaggagaagaacgagcaggacctgctggccctggactag

SEQ ID NO: 218 - DNA, 1953 bp, Artificial Sequence
  Description of Artificial Sequence: Synthetic polynucleotide
atgcccatgggctccctgcagcccctggccaccctgtacctgctgggcatgctggtggcctccgtgctggccgccgagaacctgtgggtgaccgtgtactacggcgtgcccgtgtggaaggaggccaagaccaccctgttctgcgcctccgacgccaaggcctacgagaaggaggtgcgcaacgtgtgggccacccacgcctgcgtgcccaccgaccccaacccccaggagatggtgctgaagaacgtgaccgagaacttcaacatgtggaagaacgacatggtggaccagatgcacgaggacgtgatctccctgtgggaccagtccctgaagccctgcgtgaagctgacccccctgtgcgtgaccctgaactgcaccaacgccaccaacgccaccgcctccaactcctccatcatcgagggcatgaagaactgctccttcaacatcaccaccgagctgcgcgacaagcgcgagaagaagaacgccctgttctacaagctggacatcgtgcagctggacggcaactcctcccagtaccgcctgatcaactgcaacacctccgtgatcacccaggcctgccccaaggtgtccttcgaccccatccccatccactactgcgcccccgccggctacgccatcctgaagtgcaacaacaagaccttcaccggcaccggcccctgcaacaacgtgtccaccgtgcagtgcacccacggcatcaagcccgtggtgtccacccagctgctgctgaacggctccctggccgagggcgagatcatcatccgctccgagaacatcaccaacaacgacaagaccatcatcgtgcacctgaacgagtccgtgaagatcgagtgcacccgcccctccaacaagacccgcacctccatccgcatcggccccggccagtggttctacgccaccggccaggtgatcggcgacatccgcgaggcctactgcaacatctccgagtccaagtggaacgagaccctgcagcgcgtgtccaagaagctgaaggagtacttcccccacaagaacatcaccttccagccctcctccggcggcgacctggagatcaccacccactccttcaactgcggcggcgagttcttctactgcaacacctcctccctgttcaaccgcacctacatggccaactccaccgacatggccaactccaccgagaccaactccacccgcaacatcaccatccactgccgcatcaagcagatcatcaacatgtggcaggaggtgggccgcgccatgtacgccccccccatcgccggcaacatcacctgcatctccaacatcaccggcctgctgctgacccgcgacggcggcaagaacgacaccgagaccttccgccccggcggcggcaacatgaaggacaactggcgctccgagctgtacaagtacaaggtggtgaagatcgagcccctgggcgtggcccccacccgctgcaagcgccgcgtggtgggccgccgccgccgccgccgcgccgtgggcatcggcgccgtgttcctgggcttcctgggcgccgccggctccaccatgggcgccgcctccatgaccctgaccgtgcaggcccgcaacctgctgtccggcatcgtgcagcagcagtccaacctgctgcgcgcccccgaggcccagcagcacctgctgaagctgaccgtgtggggcatcaagcagctgcaggcccgcgtgctggccgtggagcgctacctgcgcgaccagcagctgctgggcatctggggctgctccggcaagctgatctgctgcaccaacgtgccctggaactcctcctggtccaaccgcaacctgtccgagatctgggacaacatgacctggctgcagtgggacaaggagatctccaactacacccagatcatctacggcctgctggaggagtcccagaaccagcaggagaagaacgagcaggacctgctggccctggactag

SEQ ID NO: 219 - DNA, 1977 bp, Artificial Sequence
  Description of Artificial Sequence: Synthetic polynucleotide
atgcccatgggctccctgcagcccctggccaccctgtacctgctgggcatgctggtggcctccgtgctggccgccgagaacctgtgggtgaccgtgtactacggcgtgcccgtgtggaaggaggccaagaccaccctgttctgcgcctccgacgccaaggcctacgagaagaaggtgcacaacgtgtgggccacccacgcctgcgtgcccaccgaccccaacccccaggagatggtgctgaagaacgtgaccgagaacttcaacatgtggaagaacgacatggtggaccagatgcacgaggacgtgatctccctgtgggaccagtccctgaagccctgcgtgaagctgacccccctgtgcgtgaccctgaactgcaccaacgccaccaccaacgccaccgcctccaactcctccatcatcgagggcatgaagaactgctccttcaacatcaccaccgagctgcgcgacaagcgcgagaagaagaacgccctgttctacaagctggacatcgtgcagctggacggcaactcctcccagtaccgcctgatcaactgcaacacctccgtgatcacccaggcctgccccaaggtgtccttcgaccccatccccatccactactgcgcccccgccggctacgccatcctgaagtgcaacaacaagaccttcaccggcaccggcccctgcaacaacgtgtccaccgtgcagtgcacccacggcatcaagcccgtggtgtccacccagctgctgctgaacggctccctggccgagggcgagatcatcatccgctccgagaacatcaccaacaacgccaagaccatcatcgtgcacctgaacgagtccgtgaagatcgagtgcacccgccccaacaacaagacccgcacctccatccgcatcggccccggccagtggttctacgccaccggccaggtgatcggcgacatccgcgaggcctactgcaacatctccgagtccaagtggaacgagaccctgcagcgcgtgtccaagaagctgaaggagtacttcccccacaagaacatcaccttccagccctcctccggcggcgacctggagatcaccacccactccttcaactgcggcggcgagttcttctactgcaacacctcctccctgttcaaccgcacctacatggccaactccaccgacatggccaactccaccgagaccaactccacccgcatcatcaccatccactgccgcatcaagcagatcatcaacatgtggcaggaggtgggccgcgccatgtacgccccccccatcgccggcaacatcacctgcatctccaacatcaccggcctgctgctgacccgcgacggcggcaagaacacccgcgacggcggcaagaacaacaccgagaccttccgccccggcggcggcaacatgaaggacaactggcgctccgagctgtacaagtacaaggtggtgaagatcgagcccctgggcgtggcccccacccgctgcaagcgccgcgtggtgggccgccgccgccgccgccgcgccgtgggcatcggcgccgtgttcctgggcttcctgggcgccgccggctccaccatgggcgccgcctccatgaccctgaccgtgcaggcccgcaacctgctgtccggcatcgtgcagcagcagtccaacctgctgcgcgcccccgaggcccagcagcacctgctgaagctgaccgtgtggggcatcaagcagctgcaggcccgcgtgctggccgtggagcgctacctgcgcgaccagcagctgctgggcatctggggctgctccggcaagctgatctgctgcaccaacgtgccctggaactcctcctggtccaaccgcaacctgtccgagatctgggacaacatgacctggctgcagtgggacaaggagatctccaactacacccagatcatctacggcctgctggaggagtcccagaaccagcaggagaagaacgagcaggacctgctggccctggactag

SEQ ID NO: 220 - DNA, 1977 bp, Artificial Sequence
  Description of Artificial Sequence: Synthetic polynucleotide
atgcccatgggctccctgcagcccctggccaccctgtacctgctgggcatgctggtggcctccgtgctggccgccgagaacctgtgggtgaccgtgtactacggcgtgcccgtgtggaaggaggccaagaccaccctgttctgcgcctccgacgccaaggcctacgagaaggaggtgcgcaacgtgtgggccacccacgcctgcgtgcccaccgaccccaacccccaggagatggtgctgaagaacgtgaccgagaacttcaacatgtggaagaacgacatggtggaccagatgcacgaggacgtgatctccctgtgggaccagtccctgaagccctgcgtgaagctgacccccctgtgcgtgaccctgaactgcaccaacgccaccaccaacgccaccgcctccaactcctccatcatcgagggcatgaagaactgctccttcaacatcaccaccgagctgcgcgacaagcgcgagaagaagaacgccctgttctacaagctggacatcgtgcagctggacggcaactcctcccagtaccgcctgatcaactgcaacacctccgtgatcacccaggcctgccccaaggtgtccttcgaccccatccccatccactactgcgcccccgccggctacgccatcctgaagtgcaacaacaagaccttcaccggcaccggcccctgcaacaacgtgtccaccgtgcagtgcacccacggcatcaagcccgtggtgtccacccagctgctgctgaacggctccctggccgagggcgagatcatcatccgctccgagaacatcaccaacaacgccaagaccatcatcgtgcacctgaacgagtccgtgaagatcgagtgcacccgccccaacaacaagacccgcacctccatccgcatcggccccggccagtggttctacgccaccggccaggtgatcggcgacatccgcgaggcctactgcaacatctccgagtccaagtggaacgagaccctgcagcgcgtgtccaagaagctgaaggagtacttcccccacaagaacatcaccttccagccctcctccggcggcgacctggagatcaccacccactccttcaactgcggcggcgagttcttctactgcaacacctcctccctgttcaaccgcacctacatggccaactccaccgacatggccaactccaccgagaccaactccacccgcatcatcaccatccactgccgcatcaagcagatcatcaacatgtggcaggaggtgggccgcgccatgtacgccccccccatcgccggcaacatcacctgcatctccaacatcaccggcctgctgctgacccgcgacggcggcaagaacacccgcgacggcggcaagaacaacaccgagaccttccgccccggcggcggcaacatgaaggacaactggcgctccgagctgtacaagtacaaggtggtgaagatcgagcccctgggcgtggcccccacccgctgcaagcgccgcgtggtgggccgccgccgccgccgccgcgccgtgggcatcggcgccgtgttcctgggcttcctgggcgccgccggctccaccatgggcgccgcctccatgaccctgaccgtgcaggcccgcaacctgctgtccggcatcgtgcagcagcagtccaacctgctgcgcgcccccgaggcccagcagcacctgctgaagctgaccgtgtggggcatcaagcagctgcaggcccgcgtgctggccgtggagcgctacctgcgcgaccagcagctgctgggcatctggggctgctccggcaagctgatctgctgcaccaacgtgccctggaactcctcctggtccaaccgcaacctgtccgagatctgggacaacatgacctggctgcagtgggacaaggagatctccaactacacccagatcatctacggcctgctggaggagtcccagaaccagcaggagaagaacgagcaggacctgctggccctggactag

SEQ ID NO: 221 - DNA, 1944 bp, Artificial Sequence
  Description of Artificial Sequence: Synthetic polynucleotide
atgcccatgggcagcctgcagcccctggccaccctgtacctgctgggcatgctggtggctagcgtgctggccgccgagaacctgtgggtgaccgtctactatggcgtgcccgtctggaaggaagccaaaaccacactgttctgcgctagcgacgctaaggcatacgagaaaaaagtgcacaatgtctgggctactcatgcatgcgtgcctaccgatccaaatccccaggagatggtgctgaagaacgtcacagaaaactttaatatgtggaagaacgacatggtggatcagatgcacgaggacgtgatcagcctgtgggatcagtccctgaagccatgcgtgaaactgactcccctgtgcgtcaccctgaactgtactaatgccaccgcttccaacagctccatcattgaggggatgaagaactgttctttcaatatcactaccgagctgcgcgacaagcgagaaaagaaaaatgccctgttttacaaactggacatcgtgcagctggatggcaactctagtcagtatagactgattaactgcaatacaagcgtgatcactcaggcatgtccaaaggtcagtttcgatcctattccaatccactactgcgcacccgccggatatgctatcctgaagtgtaacaacaagaccttcaccggcactgggccttgcaacaacgtgagcaccgtccagtgtacacatggcattaagccagtggtcagcacccagctgctgctgaacggcagcctggcagagggcgaaatcattatccgcagcgagaacatcacaaataatgtgaagactatcatcgtccacctgaacgagagcgtgaagattgaatgcacacggcccaacaacaagaccaggacatccattcgcatcggacctggccagtggttctacgctactggccaggtcatcggggacatcagagaggcctattgtaacatcaatgagtcaaagtggaatgaaactctgcagagggtgagcaagaaactgaaggaatacttccctcacaaaaacatcacctttcagccatcaagcggcggggacctggagattacaactcattctttcaattgcggaggcgaattcttttactgtaacacctcctctctgtttaatcgcacatatatggctaacagtactgatatggcaaactctactgagaccaatagtacacgaactattaccatccattgccggatcaagcagattatcaacatgtggcaggaagtggggcgggccatgtatgctccccctattgcaggaaatattacctgtatcagcaacattaccggcctgctgctgacaagagacgggggaaagaacaatacagagacttttaggcctggcgggggaaacatgaaagataattggcgctccgagctgtacaagtataaagtggtcaagatcgaaccactgggagtggcacctacccgatgtaaacggagagtggtcggaaggcgccgacggagaagggcagtgggaatcggagccgtcttcctgggctttctgggagcagctggcagcacaatgggagcagcctctatgaccctgacagtgcaggctcgaaatctgctgagtgggatcgtgcagcagcagtcaaacctgctgcgagcaccagaggcacagcagcatctgctgaagctgaccgtgtggggcatcaagcagctgcaggccagagtgctggctgtcgaacggtacctgagagatcagcagctgctgggaatctggggatgcagcggaaagctgatttgctgtacaaacgtgccctggaatagttcatggtcaaacaggaatctgagcgagatctgggacaatatgacctggctgcagtgggataaggaaatcagtaactacacacagatcatctatggcctgctggaggaatcacagaaccagcaggagaaaaatgaacaggacctgctggccctggattga

SEQ ID NO: 222 - DNA, 1938 bp, Artificial Sequence
  Description of Artificial Sequence: Synthetic polynucleotide
atgggcagcctgcagcccctggccaccctgtacctgctgggcatgctggtggctagcgtgctggccgccgagaacctgtgggtgaccgtctactatggcgtgcccgtctggaaggaagccaaaaccacactgttctgcgctagcgacgctaaggcatacgagaaagaagtgagaaatgtctgggctactcatgcatgcgtgcctaccgatccaaatccccaggagatggtgctgaagaacgtcacagaaaactttaatatgtggaagaacgacatggtggatcagatgcacgaggacgtgatcagcctgtgggatcagtccctgaagccatgcgtgaaactgactcccctgtgcgtcaccctgaactgtactaatgccaccgcttccaacagctccatcattgaggggatgaagaactgttctttcaatatcactaccgagctgcgcgacaagcgagaaaagaaaaatgccctgttttacaaactggacatcgtgcagctggatggcaactctagtcagtatagactgattaactgcaatacaagcgtgatcactcaggcatgtccaaaggtcagtttcgatcctattccaatccactactgcgcacccgccggatatgctatcctgaagtgtaacaacaagaccttcaccggcactgggccttgcaacaacgtgagcaccgtccagtgtacacatggcattaagccagtggtcagcacccagctgctgctgaacggcagcctggcagagggcgaaatcattatccgcagcgagaacatcacaaataatgtgaagactatcatcgtccacctgaacgagagcgtgaagattgaatgcacacggcccaacaacaagaccaggacatccattcgcatcggacctggccagtggttctacgctactggccaggtcatcggggacatcagagaggcctattgtaacatcaatgagtcaaagtggaatgaaactctgcagagggtgagcaagaaactgaaggaatacttccctcacaaaaacatcacctttcagccatcaagcggcggggacctggagattacaactcattctttcaattgcggaggcgaattcttttactgtaacacctcctctctgtttaatcgcacatatatggctaacagtactgatatggcaaactctactgagaccaatagtacacgaactattaccatccattgccggatcaagcagattatcaacatgtggcaggaagtggggcgggccatgtatgctccccctattgcaggaaatattacctgtatcagcaacattaccggcctgctgctgacaagagacgggggaaagaacaatacagagacttttaggcctggcgggggaaacatgaaagataattggcgctccgagctgtacaagtataaagtggtcaagatcgaaccactgggagtggcacctacccgatgtaaacggagagtggtcggaaggcgccgacggagaagggcagtgggaatcggagccgtcttcctgggctttctgggagcagctggcagcacaatgggagcagcctctatgaccctgacagtgcaggctcgaaatctgctgagtgggatcgtgcagcagcagtcaaacctgctgcgagcaccagaggcacagcagcatctgctgaagctgaccgtgtggggcatcaagcagctgcaggccagagtgctggctgtcgaacggtacctgagagatcagcagctgctgggaatctggggatgcagcggaaagctgatttgctgtacaaacgtgccctggaatagttcatggtcaaacaggaatctgagcgagatctgggacaatatgacctggctgcagtgggataaggaaatcagtaactacacacagatcatctatggcctgctggaggaatcacagaaccagcaggagaaaaatgaacaggacctgctggccctggattga

SEQ ID NO: 223 - DNA, 1956 bp, Artificial Sequence
  Description of Artificial Sequence: Synthetic polynucleotide
atgggctccctgcagcccctggccaccctgtacctgctgggcatgctggtggcctccgtgctggccgccgagaacctgtgggtgaccgtgtactacggcgtgcccgtgtggaaggaggccaagaccaccctgttctgcgcctccgacgccaaggcctacgagaaggaggtgcacaacgtgtgggccacccacgcctgcgtgcccaccgaccccaacccccaggagatggtgctgaagaacgtgaccgagaacttcaacatgtggaagaacgacatggtggaccagatgcacgaggacgtgatctccctgtgggaccagtccctgaagccctgcgtgaagctgacccccctgtgcgtgaccctgaactgcaccaacgccaccaccaacgccaccgcctccaactcctccatcatcgagggcatgaagaactgctccttcaacatcaccaccgagctgcgcgacaagcgcgagaagaagaacgccctgttctacaagctggacatcgtgcagctggacggcaactcctcccagtaccgcctgatcaactgcaacacctccgtgatcacccaggcctgccccaaggtgtccttcgaccccatccccatccactactgcgcccccgccggctacgccatcctgaagtgcaacaacaagaccttcaccggcaccggcccctgcaacaacgtgtccaccgtgcagtgcacccacggcatcaagcccgtggtgtccacccagctgctgctgaacggctccctggccgagggcgagatcatcatccgctccgagaacatcaccaacaacgccaagaccatcatcgtgcacctgaacgagtccgtgaagatcgagtgcacccgccccaacaacaagacccgcacctccatccgcatcggccccggccaggccttctacgccaccggccaggtgatcggcgacatccgcgaggcccactgcaacatctccgagtccaagtggaacgagaccctgcagcgcgtgtccaagaagctgaaggagtacttcccccacaagaacatcaccttccagccctcctccggcggcgacctggagatcaccacccactccttcaactgcggcggcgagttcttctactgcaacacctcctccctgttcaaccgcacctacatggccaactccaccgacatggccaactccaccgagaccaactccacccgcaccatcaccatccgctgccgcatcaagcagatcatcaacatgtggcaggaggtgggccgcgccatgtacgccccccccatcgccggcaacatcacctgcatctccaacatcaccggcctgctgctgacccgcgacggcggcaagaacaacaccgacaccgagaccttccgccccggcggcggcaacatgaaggacaactggcgctccgagctgtacaagtacaaggtggtgaagatcgagcccctgggcgtggcccccacccgctgcaagcgccgcgtggtgggccgccgccgccgccgccgcgccgtgggcatcggcgccgtgttcctgggcttcctgggcgccgccggctccaccatgggcgccgcctccatgaccctgaccgtgcaggcccgcaacctgctgtccggcatcgtgcagcagcagtccaacctgctgcgcgcccccgaggcccagcagcacctgctgaagctgaccgtgtggggcatcaagcagctgcaggcccgcgtgctggccgtggagcgctacctgcgcgaccagcagctgctgggcatctggggctgctccggcaagctgatctgctgcaccaacgtgccctggaactcctcctggtccaaccgcaacctgtccgagatctgggacaacatgacctggctgcagtgggacaaggagatctccaactacacccagatcatctacggcctgctggaggagtcccagaaccagcaggagaagaacgagcaggacctgctggccctggactag

SEQ ID NO: 224 - DNA, 1956 bp, Artificial Sequence
  Description of Artificial Sequence: Synthetic polynucleotide
atgggctccctgcagcccctggccaccctgtacctgctgggcatgctggtggcctccgtgctggccgccgagaacctgtgggtgaccgtgtactacggcgtgcccgtgtggaaggaggccaagaccaccctgttctgcgcctccgacgccaaggcctacgagaaggaggtgcacaacgtgtgggccacccacgcctgcgtgcccaccgaccccaacccccaggagatggtgctgaagaacgtgaccgagaacttcaacatgtggaagaacgacatggtggaccagatgcacgaggacgtgatctccctgtgggaccagtccctgaagccctgcgtgaagctgacccccctgtgcgtgaccctgaactgcaccaacgccaccaccaacgccaccgcctccaactcctccatcatcgagggcatgaagaactgctccttcaacatcaccaccgagctgcgcgacaagcgcgagaagaagaacgccctgttctacaagctggacatcgtgcagctggacggcaactcctcccagtaccgcctgatcaactgcaacacctccgtgtgcacccaggcctgccccaaggtgtccttcgaccccatccccatccactactgcgcccccgccggctacgccatcctgaagtgcaacaacaagaccttcaccggcaccggcccctgcaacaacgtgtccaccgtgcagtgcacccacggcatcaagcccgtggtgtccacccagctgctgctgaacggctccctggccgagggcgagatcatcatccgctccgagaacatcaccaacaacgccaagaccatcatcgtgcacctgaacgagtccgtgaagatcgagtgcacccgccccaacaacaagacccgcacctccatccgcatcggccccggccaggccttctacgccaccggccaggtgatcggcgacatccgcgaggcccactgcaacatctccgagtccaagtggaacgagaccctgcagcgcgtgtccaagaagctgaaggagtacttcccccacaagaacatcaccttccagccctcctccggcggcgacctggagatcaccacccactccttcaactgcggcggcgagttcttctactgcaacacctcctccctgttcaaccgcacctacatggccaactccaccgacatggccaactccaccgagaccaactccacccgcaccatcaccatccgctgccgcatcaagcagatcatcaacatgtggcaggaggtgggccgctgcatgtacgccccccccatcgccggcaacatcacctgcatctccaacatcaccggcctgctgctgacccgcgacggcggcaagaacaacaccgacaccgagaccttccgccccggcggcggcaacatgaaggacaactggcgctccgagctgtacaagtacaaggtggtgaagatcgagcccctgggcgtggcccccacccgctgcaagcgccgcgtggtgggccgccgccgccgccgccgcgccgtgggcatcggcgccgtgttcctgggcttcctgggcgccgccggctccaccatgggcgccgcctccatgaccctgaccgtgcaggcccgcaacctgctgtccggcatcgtgcagcagcagtccaacctgctgcgcgcccccgaggcccagcagcacctgctgaagctgaccgtgtggggcatcaagcagctgcaggcccgcgtgctggccgtggagcgctacctgcgcgaccagcagctgctgggcatctggggctgctccggcaagctgatctgctgcaccaacgtgccctggaactcctcctggtccaaccgcaacctgtccgagatctgggacaacatgacctggctgcagtgggacaaggagatctccaactacacccagatcatctacggcctgctggaggagtcccagaaccagcaggagaagaacgagcaggacctgctggccctggactag

SEQ ID NO: 225 - DNA, 1956 bp, Artificial Sequence
  Description of Artificial Sequence: Synthetic polynucleotide
atgggctccctgcagcccctggccaccctgtacctgctgggcatgctggtggcctccgtgctggccgccgagaacctgtgggtgaccgtgtactacggcgtgcccgtgtggaaggaggccaagaccaccctgttctgcgcctccgacgccaaggcctacgagaagaaggtgcacaacgtgtgggccacccacgcctgcgtgcccaccgaccccaacccccaggagatggtgctgaagaacgtgaccgagaacttcaacatgtggaagaacgacatggtggaccagatgcacgaggacgtgatctccctgtgggaccagtccctgaagccctgcgtgaagctgacccccctgtgcgtgaccctgaactgcaccaacgccaccaccaacgccaccgcctccaactcctccatcatcgagggcatgaagaactgctccttcaacatcaccaccgagctgcgcgacaagcgcgagaagaagaacgccctgttctacaagctggacatcgtgcagctggacggcaactcctcccagtaccgcctgatcaactgcaacacctccgtgatcacccaggcctgccccaaggtgtccttcgaccccatccccatccactactgcgcccccgccggctacgccatcctgaagtgcaacaacaagaccttcaccggcaccggcccctgcaacaacgtgtccaccgtgcagtgcacccacggcatcaagcccgtggtgtccacccagctgctgctgaacggctccctggccgagggcgagatcatcatccgctccgagaacatcaccaacaacgccaagaccatcatcgtgcacctgaacgagtccgtgaagatcgagtgcacccgccccaacaacaagacccgcacctccatccgcatcggccccggccagtggttctacgccaccggccaggtgatcggcgacatccgcgaggcccactgcaacatctccgagtccaagtggaacgagaccctgcagcgcgtgtccaagaagctgaaggagtacttcccccacaagaacatcaccttccagccctcctccggcggcgacctggagatcaccacccactccttcaactgcggcggcgagttcttctactgcaacacctcctccctgttcaaccgcacctacatggccaactccaccgacatggccaactccaccgagaccaactccacccgcaccatcaccatccgctgccgcatcaagcagatcatcaacatgtggcaggaggtgggccgcgccatgtacgccccccccatcgccggcaacatcacctgcatctccaacatcaccggcctgctgctgacccgcgacggcggcaagaacaacaccgacaccgagaccttccgccccggcggcggcaacatgaaggacaactggcgctccgagctgtacaagtacaaggtggtgaagatcgagcccctgggcgtggcccccacccgctgcaagcgccgcgtggtgggccgccgccgccgccgccgcgccgtgggcatcggcgccgtgttcctgggcttcctgggcgccgccggctccaccatgggcgccgcctccatgaccctgaccgtgcaggcccgcaacctgctgtccggcatcgtgcagcagcagtccaacctgctgcgcgcccccgaggcccagcagcacctgctgaagctgaccgtgtggggcatcaagcagctgcaggcccgcgtgctggccgtggagcgctacctgcgcgaccagcagctgctgggcatctggggctgctccggcaagctgatctgctgcaccaacgtgccctggaactcctcctggtccaaccgcaacctgtccgagatctgggacaacatgacctggctgcagtgggacaaggagatctccaactacacccagatcatctacggcctgctggaggagtcccagaaccagcaggagaagaacgagcaggacctgctggccctggactag

SEQ ID NO: 226 - DNA, 1956 bp, Artificial Sequence
  Description of Artificial Sequence: Synthetic polynucleotide
atgggctccctgcagcccctggccaccctgtacctgctgggcatgctggtggcctccgtgctggccgccgagaacctgtgggtgaccgtgtactacggcgtgcccgtgtggaaggaggccaagaccaccctgttctgcgcctccgacgccaaggcctacgagaaggaggtgcgcaacgtgtgggccacccacgcctgcgtgcccaccgaccccaacccccaggagatggtgctgaagaacgtgaccgagaacttcaacatgtggaagaacgacatggtggaccagatgcacgaggacgtgatctccctgtgggaccagtccctgaagccctgcgtgaagctgacccccctgtgcgtgaccctgaactgcaccaacgccaccaccaacgccaccgcctccaactcctccatcatcgagggcatgaagaactgctccttcaacatcaccaccgagctgcgcgacaagcgcgagaagaagaacgccctgttctacaagctggacatcgtgcagctggacggcaactcctcccagtaccgcctgatcaactgcaacacctccgtgatcacccaggcctgccccaaggtgtccttcgaccccatccccatccactactgcgcccccgccggctacgccatcctgaagtgcaacaacaagaccttcaccggcaccggcccctgcaacaacgtgtccaccgtgcagtgcacccacggcatcaagcccgtggtgtccacccagctgctgctgaacggctccctggccgagggcgagatcatcatccgctccgagaacatcaccaacaacgccaagaccatcatcgtgcacctgaacgagtccgtgaagatcgagtgcacccgccccaacaacaagacccgcacctccatccgcatcggccccggccagtggttctacgccaccggccaggtgatcggcgacatccgcgaggcccactgcaacatctccgagtccaagtggaacgagaccctgcagcgcgtgtccaagaagctgaaggagtacttcccccacaagaacatcaccttccagccctcctccggcggcgacctggagatcaccacccactccttcaactgcggcggcgagttcttctactgcaacacctcctccctgttcaaccgcacctacatggccaactccaccgacatggccaactccaccgagaccaactccacccgcaccatcaccatccgctgccgcatcaagcagatcatcaacatgtggcaggaggtgggccgcgccatgtacgccccccccatcgccggcaacatcacctgcatctccaacatcaccggcctgctgctgacccgcgacggcggcaagaacaacaccgacaccgagaccttccgccccggcggcggcaacatgaaggacaactggcgctccgagctgtacaagtacaaggtggtgaagatcgagcccctgggcgtggcccccacccgctgcaagcgccgcgtggtgggccgccgccgccgccgccgcgccgtgggcatcggcgccgtgttcctgggcttcctgggcgccgccggctccaccatgggcgccgcctccatgaccctgaccgtgcaggcccgcaacctgctgtccggcatcgtgcagcagcagtccaacctgctgcgcgcccccgaggcccagcagcacctgctgaagctgaccgtgtggggcatcaagcagctgcaggcccgcgtgctggccgtggagcgctacctgcgcgaccagcagctgctgggcatctggggctgctccggcaagctgatctgctgcaccaacgtgccctggaactcctcctggtccaaccgcaacctgtccgagatctgggacaacatgacctggctgcagtgggacaaggagatctccaactacacccagatcatctacggcctgctggaggagtcccagaaccagcaggagaagaacgagcaggacctgctggccctggactag

SEQ ID NO: 227 - DNA, 1977 bp, Artificial Sequence
  Description of Artificial Sequence: Synthetic polynucleotide
atgggctccctgcagcccctggccaccctgtacctgctgggcatgctggtggcctccgtgctggccgccgagaacctgtgggtgaccgtgtactacggcgtgcccgtgtggaaggaggccaagaccaccctgttctgcgcctccgacgccaaggcctacgagaaggaggtgcacaacgtgtgggccacccacgcctgcgtgcccaccgaccccaacccccaggagatggtgctgaagaacgtgaccgagaacttcaacatgtgggagaacgacatggtggaccagatgcacgaggacgtgatctccctgtgggaccagtccctgaagccctgcgtgaagctgacccccctgtgcgtgaccctgaactgcaccgacgccaccgcctccaacgccaccgcctccaacgccaccgcctccaactcctccatcatcgagggcatgaagaactgctccttcaacatcaccaccgagctgcgcgacaagcgcgagaagaagaacgccctgttctacaagctggacatcgtgcagctggacggcaactcctcccagtaccgcctgatcaactgcaacacctccgtgatcacccaggcctgccccaaggtgtccttcgaccccatccccatccactactgcgcccccgccggctacgccatcctgaagtgcaacaacaagaccttcaacggcaccggcccctgcaacaacgtgtccaccgtgcagtgcacccacggcatcaagcccgtggtgtccacccagctgctgctgaacggctccctggccgagggcgagatcatcatccgctccgagaacatcaccgacaacggcaagaccatcatcgtgcacctgaacgagtccgtgaagatcgagtgcacccgcccctccaacaacacccgcacctccatccgcatcggccccggccaggccttctacgccaccggccaggtgatcggcgacatccgcgaggcccactgcaacatctccgagaacaagtggaacgagaccctgcagcgcgtgtccaagaagctgaaggagtacttcccccacaagaacatcaccttccagccctcctccggcggcgacctggagatcaccacccactccttcaactgcggcggcgagttcttctactgcaacacctcctccctgttcaaccgcacctacatggccaactccaccgacatggccaactccaccgagaccaactccacccgcaccatcaccatccgctgccgcatcaagcagatcatcaacatgtggcaggaggtgggccgcgccatgtacgccccccccatcgccggcaacatcacctgcatctccaacatcaccggcctgctgctgacccgcgacggcggcaagaacaacaccgagaccttcgagaccttccgccccggcggcggcaacatgaaggacaactggcgctccgagctgtacaagtacaaggtggtgaagatcgagcccctgggcgtggcccccacccgctgcaagcgccgcgtggtgggccgccgccgccgccgccgcgccgtgggcatcggcgccgtgttcctgggcttcctgggcgccgccggctccaccatgggcgccgcctccatgaccctgaccgtgcaggcccgcaacctgctgtccggcatcgtgcagcagcagtccaacctgctgcgcgcccccgaggcccagcagcacctgctgaagctgaccgtgtggggcatcaagcagctgcaggcccgcgtgctggccgtggagcgctacctgcgcgaccagcagctgctgggcatctggggctgctccggcaagctgatctgctgcaccaacgtgccctggaactcctcctggtccaaccgcaacctgtccgagatctgggacaacatgacctggctgcagtgggacaaggagatctccaactacacccagatcatctacggcctgctggaggagtcccagaaccagcaggagaagaacgagcaggacctgctggccctggactag

SEQ ID NO: 228 - DNA, 1977 bp, Artificial Sequence
  Description of Artificial Sequence: Synthetic polynucleotide
atgggctccctgcagcccctggccaccctgtacctgctgggcatgctggtggcctccgtgctggccgccgagaacctgtgggtgaccgtgtactacggcgtgcccgtgtggaaggaggccaagaccaccctgttctgcgcctccgacgccaaggcctacgagaaggaggtgcacaacgtgtgggccacccacgcctgcgtgcccaccgaccccaacccccaggagatggtgctgaagaacgtgaccgagaacttcaacatgtgggagaacgacatggtggaccagatgcacgaggacgtgatctccctgtgggaccagtccctgaagccctgcgtgaagctgacccccctgtgcgtgaccctgaactgcaccgacgccaccgcctccaacgccaccgcctccaacgccaccgcctccaactcctccatcatcgagggcatgaagaactgctccttcaacatcaccaccgagctgcgcgacaagcgcgagaagaagaacgccctgttctacaagctggacatcgtgcagctggacggcaactcctcccagtaccgcctgatcaactgcaacacctccgtgtgcacccaggcctgccccaaggtgtccttcgaccccatccccatccactactgcgcccccgccggctacgccatcctgaagtgcaacaacaagaccttcaacggcaccggcccctgcaacaacgtgtccaccgtgcagtgcacccacggcatcaagcccgtggtgtccacccagctgctgctgaacggctccctggccgagggcgagatcatcatccgctccgagaacatcaccgacaacggcaagaccatcatcgtgcacctgaacgagtccgtgaagatcgagtgcacccgcccctccaacaacacccgcacctccatccgcatcggccccggccaggccttctacgccaccggccaggtgatcggcgacatccgcgaggcccactgcaacatctccgagaacaagtggaacgagaccctgcagcgcgtgtccaagaagctgaaggagtacttcccccacaagaacatcaccttccagccctcctccggcggcgacctggagatcaccacccactccttcaactgcggcggcgagttcttctactgcaacacctcctccctgttcaaccgcacctacatggccaactccaccgacatggccaactccaccgagaccaactccacccgcaccatcaccatccgctgccgcatcaagcagatcatcaacatgtggcaggaggtgggccgctgcatgtacgccccccccatcgccggcaacatcacctgcatctccaacatcaccggcctgctgctgacccgcgacggcggcaagaacaacaccgagaccttcgagaccttccgccccggcggcggcaacatgaaggacaactggcgctccgagctgtacaagtacaaggtggtgaagatcgagcccctgggcgtggcccccacccgctgcaagcgccgcgtggtgggccgccgccgccgccgccgcgccgtgggcatcggcgccgtgttcctgggcttcctgggcgccgccggctccaccatgggcgccgcctccatgaccctgaccgtgcaggcccgcaacctgctgtccggcatcgtgcagcagcagtccaacctgctgcgcgcccccgaggcccagcagcacctgctgaagctgaccgtgtggggcatcaagcagctgcaggcccgcgtgctggccgtggagcgctacctgcgcgaccagcagctgctgggcatctggggctgctccggcaagctgatctgctgcaccaacgtgccctggaactcctcctggtccaaccgcaacctgtccgagatctgggacaacatgacctggctgcagtgggacaaggagatctccaactacacccagatcatctacggcctgctggaggagtcccagaaccagcaggagaagaacgagcaggacctgctggccctggactag

SEQ ID NO: 229 - DNA, 1974 bp, Artificial Sequence
  Description of Artificial Sequence: Synthetic polynucleotide
atgggctccctgcagcccctggccaccctgtacctgctgggcatgctggtggcctccgtgctggccgccgagaacctgtgggtgaccgtgtactacggcgtgcccgtgtggaaggaggccaagaccaccctgttctgcgcctccgacgccaaggcctacgagaagaaggtgcacaacgtgtgggccacccacgcctgcgtgcccaccgaccccaacccccaggagatggtgctgaagaacgtgaccgagaacttcaacatgtgggagaacgacatggtggaccagatgcacgaggacgtgatctccctgtgggaccagtccctgaagccctgcgtgaagctgacccccctgtgcgtgaccctgaactgcaccgacgccaccgcctccaacgccaccgcctccaacgccaccgcctccaactcctccatcatcgagggcatgaagaactgctccttcaacatcaccaccgagctgcgcgacaagcgcgagaagaagaacgccctgttctacaagctggacatcgtgcagctggacggcaactcctcccagtaccgcctgatcaactgcaacacctccgtgatcacccaggcctgccccaaggtgtccttcgaccccatccccatccactactgcgcccccgccggctacgccatcctgaagtgcaacaacaagaccttcaacggcaccggcccctgcaacaacgtgtccaccgtgcagtgcacccacggcatcaagcccgtggtgtccacccagctgctgctgaacggctccctggccgagggcgagatcatcatccgctccgagaacatcaccgacaacggcaagaccatcatcgtgcacctgaacgagtccgtgaagatcgagtgcacccgcccctccaacaacacccgcacctccatccgcatcggccccggccagtggttctacgccaccggccaggtgatcggcgacatccgcgaggcccactgcaacatctccgagaacaagtggaacgagaccctgcagcgcgtgtccaagaagctgaaggagtacttcccccacaagaacatcaccttccagccctcctccggcggcgacctggagatcaccacccactccttcaactgcggcggcgagttcttctactgcaacacctcctccctgttcaaccgcacctacatggccaactccaccgacatggccaactccaccgagaccaactccacccgcaccatcaccatccgctgccgcatcaagcagatcatcaacatgtggcaggaggtgggccgcgccatgtacgccccccccatcgccggcaacatcacctgcatctccaacatcaccggcctgctgctgacccgcgacggcggcaagaacaacaccgagaccttcgagaccttccgccccggcggcggcaacatgaaggacaactggcgctccgagctgtacaagtacaaggtggtgaagatcgagcccctgggcgtggcccccacccgctgcaagcgccgcgtggtgggccgccgccgccgccgccgcgccgtgggcatcggcgccgtgttcctgggcttcctgggcgccgccggctccaccatgggcgccgcctccatgaccctgaccgtgcaggcccgcaacctgctgtccggcatcgtgcagcagcagtccaacctgctgcgcgcccccgaggcccagcagcacctgctgaagctgaccgtgtggggcatcaagcagctgcaggcccgcgtgctggccgtggagcgctacctgcgcgaccagcagctgctgggcatctggggctgctccggcaagctgatctgctgcaccaacgtgccctggaactcctcctggtccaaccgcaacctgtccgagatctgggacaacatgacctggctgcagtgggacaaggagatctccaactacacccagatcatctacggcctgctggaggagtcccagaaccagcaggagaagaacgagcaggacctgctggccctggac

SEQ ID NO: 230 - DNA, 1977 bp, Artificial Sequence
  Description of Artificial Sequence: Synthetic polynucleotide
atgggctccctgcagcccctggccaccctgtacctgctgggcatgctggtggcctccgtgctggccgccgagaacctgtgggtgaccgtgtactacggcgtgcccgtgtggaaggaggccaagaccaccctgttctgcgcctccgacgccaaggcctacgagaaggaggtgcgcaacgtgtgggccacccacgcctgcgtgcccaccgaccccaacccccaggagatggtgctgaagaacgtgaccgagaacttcaacatgtgggagaacgacatggtggaccagatgcacgaggacgtgatctccctgtgggaccagtccctgaagccctgcgtgaagctgacccccctgtgcgtgaccctgaactgcaccgacgccaccgcctccaacgccaccgcctccaacgccaccgcctccaactcctccatcatcgagggcatgaagaactgctccttcaacatcaccaccgagctgcgcgacaagcgcgagaagaagaacgccctgttctacaagctggacatcgtgcagctggacggcaactcctcccagtaccgcctgatcaactgcaacacctccgtgatcacccaggcctgccccaaggtgtccttcgaccccatccccatccactactgcgcccccgccggctacgccatcctgaagtgcaacaacaagaccttcaacggcaccggcccctgcaacaacgtgtccaccgtgcagtgcacccacggcatcaagcccgtggtgtccacccagctgctgctgaacggctccctggccgagggcgagatcatcatccgctccgagaacatcaccgacaacggcaagaccatcatcgtgcacctgaacgagtccgtgaagatcgagtgcacccgcccctccaacaacacccgcacctccatccgcatcggccccggccagtggttctacgccaccggccaggtgatcggcgacatccgcgaggcccactgcaacatctccgagaacaagtggaacgagaccctgcagcgcgtgtccaagaagctgaaggagtacttcccccacaagaacatcaccttccagccctcctccggcggcgacctggagatcaccacccactccttcaactgcggcggcgagttcttctactgcaacacctcctccctgttcaaccgcacctacatggccaactccaccgacatggccaactccaccgagaccaactccacccgcaccatcaccatccgctgccgcatcaagcagatcatcaacatgtggcaggaggtgggccgcgccatgtacgccccccccatcgccggcaacatcacctgcatctccaacatcaccggcctgctgctgacccgcgacggcggcaagaacaacaccgagaccttcgagaccttccgccccggcggcggcaacatgaaggacaactggcgctccgagctgtacaagtacaaggtggtgaagatcgagcccctgggcgtggcccccacccgctgcaagcgccgcgtggtgggccgccgccgccgccgccgcgccgtgggcatcggcgccgtgttcctgggcttcctgggcgccgccggctccaccatgggcgccgcctccatgaccctgaccgtgcaggcccgcaacctgctgtccggcatcgtgcagcagcagtccaacctgctgcgcgcccccgaggcccagcagcacctgctgaagctgaccgtgtggggcatcaagcagctgcaggcccgcgtgctggccgtggagcgctacctgcgcgaccagcagctgctgggcatctggggctgctccggcaagctgatctgctgcaccaacgtgccctggaactcctcctggtccaaccgcaacctgtccgagatctgggacaacatgacctggctgcagtgggacaaggagatctccaactacacccagatcatctacggcctgctggaggagtcccagaaccagcaggagaagaacgagcaggacctgctggccctggactag

SEQ ID NO: 231 - DNA, 1944 bp, Artificial Sequence
  Description of Artificial Sequence: Synthetic polynucleotide
atgggctccctgcagcccctggccaccctgtacctgctgggcatgctggtggcctccgtgctggccgccgagaacctgtgggtgaccgtgtactacggcgtgcccgtgtggaaggaggccaagaccaccctgttctgcgcctccgacgccaaggcctacgagaaggaggtgcacaacgtgtgggccacccacgcctgcgtgcccaccgaccccaacccccaggagatggtgctgaagaacgtgaccgagaacttcaacatgtggaagaacgacatggtggaccagatgcacgaggacgtgatctccctgtgggaccagtccctgaagccctgcgtgaagctgacccccctgtgcgtgaccctgaactgcaccgacgccaccgcctccaacgccaccgccatcaactcctccatcatcgagggcatgaagaactgctccttcaacatcaccaccgagctgcgcgacaagcgcgagaagaagaacgccctgttctacaagctggacatcgtgcagctggacggcaactcctcccagtaccgcctgatcaactgcaacacctccgtgatcacccaggcctgccccaaggtgtccttcgaccccatccccatccactactgcgcccccgccggctacgccatcctgaagtgcaacaacaagaccttcaacggcaccggcccctgcaacaacgtgtccaccgtgcagtgcacccacggcatcaagcccgtggtgtccacccagctgctgctgaacggctccctggccgagggcgagatcatcatccgctccgagaacatcaccaacaacgccaagaccatcatcgtgcacctgaacgagtccgtgaagatcgagtgcacccgcccctccaacaacacccgcacctccatccgcatcggccccggccaggccttctacgccaccggccaggtgatcggcgacatccgcgaggcccactgcaacatctccgagtccaagtggaacgagaccctgcagcgcgtgtccaagaagctgaaggagtacttcccccacaagaacatcaccttccagccctcctccggcggcgacctggagatcaccacccactccttcaactgcggcggcgagttcttctactgcaacacctcctccctgttcaaccgcacctacatggccaactccaccgagaccaactccacccgcatcatcaccatccgctgccgcatcaagcagatcatcaacatgtggcaggaggtgggccgcgccatgtacgccccccccatcgccggcaacatcacctgcatctccaacatcaccggcctgctgctgacccgcgacggcggcaagaacaacaccgagaccttcgagaccttccgccccgagggcggcaacatgaaggacaactggcgctccgagctgtacaagtacaaggtggtgaagatcgagcccctgggcgtggcccccacccgctgcaagcgccgcgtggtgggccgccgccgccgccgccgcgccgtgggcatcggcgccgtgttcctgggcttcctgggcgccgccggctccaccatgggcgccgcctccatgaccctgaccgtgcaggcccgcaacctgctgtccggcatcgtgcagcagcagtccaacctgctgcgcgcccccgaggcccagcagcacctgctgaagctgaccgtgtggggcatcaagcagctgcaggcccgcgtgctggccgtggagcgctacctgcgcgaccagcagctgctgggcatctggggctgctccggcaagctgatctgctgcaccaacgtgccctggaactcctcctggtccaaccgcaacctgtccgagatctgggacaacatgacctggctgcagtgggacaaggagatctccaactacacccagatcatctacggcctgctggaggagtcccagaaccagcaggagaagaacgagcaggacctgctggccctggactag

SEQ ID NO: 232 - DNA, 1944 bp, Artificial Sequence
  Description of Artificial Sequence: Synthetic polynucleotide
atgggctccctgcagcccctggccaccctgtacctgctgggcatgctggtggcctccgtgctggccgccgagaacctgtgggtgaccgtgtactacggcgtgcccgtgtggaaggaggccaagaccaccctgttctgcgcctccgacgccaaggcctacgagaagaaggtgcacaacgtgtgggccacccacgcctgcgtgcccaccgaccccaacccccaggagatggtgctgaagaacgtgaccgagaacttcaacatgtggaagaacgacatggtggaccagatgcacgaggacgtgatctccctgtgggaccagtccctgaagccctgcgtgaagctgacccccctgtgcgtgaccctgaactgcaccgacgccaccgcctccaacgccaccgccatcaactcctccatcatcgagggcatgaagaactgctccttcaacatcaccaccgagctgcgcgacaagcgcgagaagaagaacgccctgttctacaagctggacatcgtgcagctggacggcaactcctcccagtaccgcctgatcaactgcaacacctccgtgatcacccaggcctgccccaaggtgtccttcgaccccatccccatccactactgcgcccccgccggctacgccatcctgaagtgcaacaacaagaccttcaacggcaccggcccctgcaacaacgtgtccaccgtgcagtgcacccacggcatcaagcccgtggtgtccacccagctgctgctgaacggctccctggccgagggcgagatcatcatccgctccgagaacatcaccaacaacgccaagaccatcatcgtgcacctgaacgagtccgtgaagatcgagtgcacccgcccctccaacaacacccgcacctccatccgcatcggccccggccagtggttctacgccaccggccaggtgatcggcgacatccgcgaggcccactgcaacatctccgagtccaagtggaacgagaccctgcagcgcgtgtccaagaagctgaaggagtacttcccccacaagaacatcaccttccagccctcctccggcggcgacctggagatcaccacccactccttcaactgcggcggcgagttcttctactgcaacacctcctccctgttcaaccgcacctacatggccaactccaccgagaccaactccacccgcatcatcaccatccgctgccgcatcaagcagatcatcaacatgtggcaggaggtgggccgcgccatgtacgccccccccatcgccggcaacatcacctgcatctccaacatcaccggcctgctgctgacccgcgacggcggcaagaacaacaccgagaccttcgagaccttccgccccgagggcggcaacatgaaggacaactggcgctccgagctgtacaagtacaaggtggtgaagatcgagcccctgggcgtggcccccacccgctgcaagcgccgcgtggtgggccgccgccgccgccgccgcgccgtgggcatcggcgccgtgttcctgggcttcctgggcgccgccggctccaccatgggcgccgcctccatgaccctgaccgtgcaggcccgcaacctgctgtccggcatcgtgcagcagcagtccaacctgctgcgcgcccccgaggcccagcagcacctgctgaagctgaccgtgtggggcatcaagcagctgcaggcccgcgtgctggccgtggagcgctacctgcgcgaccagcagctgctgggcatctggggctgctccggcaagctgatctgctgcaccaacgtgccctggaactcctcctggtccaaccgcaacctgtccgagatctgggacaacatgacctggctgcagtgggacaaggagatctccaactacacccagatcatctacggcctgctggaggagtcccagaaccagcaggagaagaacgagcaggacctgctggccctggactag

SEQ ID NO: 233 - DNA, 1944 bp, Artificial Sequence
  Description of Artificial Sequence: Synthetic polynucleotide
atgggctccctgcagcccctggccaccctgtacctgctgggcatgctggtggcctccgtgctggccgccgagaacctgtgggtgaccgtgtactacggcgtgcccgtgtggaaggaggccaagaccaccctgttctgcgcctccgacgccaaggcctacgagaaggaggtgcgcaacgtgtgggccacccacgcctgcgtgcccaccgaccccaacccccaggagatggtgctgaagaacgtgaccgagaacttcaacatgtggaagaacgacatggtggaccagatgcacgaggacgtgatctccctgtgggaccagtccctgaagccctgcgtgaagctgacccccctgtgcgtgaccctgaactgcaccgacgccaccgcctccaacgccaccgccatcaactcctccatcatcgagggcatgaagaactgctccttcaacatcaccaccgagctgcgcgacaagcgcgagaagaagaacgccctgttctacaagctggacatcgtgcagctggacggcaactcctcccagtaccgcctgatcaactgcaacacctccgtgatcacccaggcctgccccaaggtgtccttcgaccccatccccatccactactgcgcccccgccggctacgccatcctgaagtgcaacaacaagaccttcaacggcaccggcccctgcaacaacgtgtccaccgtgcagtgcacccacggcatcaagcccgtggtgtccacccagctgctgctgaacggctccctggccgagggcgagatcatcatccgctccgagaacatcaccaacaacgccaagaccatcatcgtgcacctgaacgagtccgtgaagatcgagtgcacccgcccctccaacaacacccgcacctccatccgcatcggccccggccagtggttctacgccaccggccaggtgatcggcgacatccgcgaggcccactgcaacatctccgagtccaagtggaacgagaccctgcagcgcgtgtccaagaagctgaaggagtacttcccccacaagaacatcaccttccagccctcctccggcggcgacctggagatcaccacccactccttcaactgcggcggcgagttcttctactgcaacacctcctccctgttcaaccgcacctacatggccaactccaccgagaccaactccacccgcatcatcaccatccgctgccgcatcaagcagatcatcaacatgtggcaggaggtgggccgcgccatgtacgccccccccatcgccggcaacatcacctgcatctccaacatcaccggcctgctgctgacccgcgacggcggcaagaacaacaccgagaccttcgagaccttccgccccgagggcggcaacatgaaggacaactggcgctccgagctgtacaagtacaaggtggtgaagatcgagcccctgggcgtggcccccacccgctgcaagcgccgcgtggtgggccgccgccgccgccgccgcgccgtgggcatcggcgccgtgttcctgggcttcctgggcgccgccggctccaccatgggcgccgcctccatgaccctgaccgtgcaggcccgcaacctgctgtccggcatcgtgcagcagcagtccaacctgctgcgcgcccccgaggcccagcagcacctgctgaagctgaccgtgtggggcatcaagcagctgcaggcccgcgtgctggccgtggagcgctacctgcgcgaccagcagctgctgggcatctggggctgctccggcaagctgatctgctgcaccaacgtgccctggaactcctcctggtccaaccgcaacctgtccgagatctgggacaacatgacctggctgcagtgggacaaggagatctccaactacacccagatcatctacggcctgctggaggagtcccagaaccagcaggagaagaacgagcaggacctgctggccctggactag

SEQ ID NO: 234 - protein, 647 aa, Artificial Sequence
  Description of Artificial Sequence: Synthetic polypeptide
MPMGSLQPLATLYLLGMLVASVLAAENLWVTVYYGVPVWKEAKTTLFCASDAKAYEKEVHNVWATHACVPTDPNPQEMVLKNVTENFNMWKNDMVDQMHEDVISLWDQSLKPCVKLTPLCVTLNCTNATASNSSIIEGMKNCSFNITTELRDKREKKNALFYKLDIVQLDGNSSQYRLINCNTSVITQACPKVSFDPIPIHYCAPAGYAILKCNNKTFTGTGPCNNVSTVQCTHGIKPVVSTQLLLNGSLAEGEIIIRSENITNNVKTIIVHLNESVKIECTRPNNKTRTSIRIGPGQAFYATGQVIGDIREAYCNINESKWNETLQRVSKKLKEYFPHKNITFQPSSGGDLEITTHSFNCGGEFFYCNTSSLFNRTYMANSTDMANSTETNSTRTITIHCRIKQIINMWQEVGRAMYAPPIAGNITCISNITGLLLTRDGGKNNTETFRPGGGNMKDNWRSELYKYKVVKIEPLGVAPTRCKRRVVGRRRRRRAVGIGAVFLGFLGAAGSTMGAASMTLTVQARNLLSGIVQQQSNLLRAPEAQQHLLKLTVWGIKQLQARVLAVERYLRDQQLLGIWGCSGKLICCTNVPWNSSWSNRNLSEIWDNMTWLQWDKEISNYTQIIYGLLEESQNQQEKNEQDLLALD

SEQ ID NO: 235 - protein, 658 aa, Artificial Sequence
  Description of Artificial Sequence: Synthetic polypeptide
MGSLQPLATLYLLGMLVASVLAAENLWVTVYYGVPVWKEAKTTLFCASDAKAYEKEVHNVWATHACVPTDPNPQEMVLKNVTENFNMWKNDMVDQMHEDVISLWDQSLKPCVKLTPLCVTLNCTNANATASNSSIIEGMNSSIIEGMKNCSFNITTELRDKREKKNALFYKLDIVQLDGNSSQYRLINCNTSVITQACPKVSFDPIPIHYCAPAGYAILKCNNKTFNGTGPCNNVSTVQCTHGIKPVVSTQLLLNGSLAEGEIIIRSENITDNGKTIIVHLNESVKIECTRPSNNTRTSIRIGPGQAFYATGQVIGDIREAHCNISESKWNETLQRVSEKLKEYFPHKNITFQPSSGGDLEITTHSFNCGGEFFYCNTSSLFNRTYMATSTDMANSTETNSTRIITIRCRIKQIINMWQEVGRAMYAPPIAGNITCISNITGLLLTRDGGKNNTETFETFRPGGGNMKDNWRSELYKYKVVKIEPLGVAPTRCKRRVVGRRRRRRAVGIGAVFLGFLGAAGSTMGAASMTLTVQARNLLSGIVQQQSNLLRAPEAQQHLLKLTVWGIKQLQARVLAVERYLRDQQLLGIWGCSGKLICCTNVPWNSSWSNRNLSEIWDNMTWLQWDKEISNYTQIIYGLLEESQNQQEKNEQDLLALD

SEQ ID NO: 236 - protein, 647 aa, Artificial Sequence
  Description of Artificial Sequence: Synthetic polypeptide
MGSLQPLATLYLLGMLVASVLAAENLWVTVYYGVPVWKEAKTTLFCASDAKAYEKEVHNVWATHACVPTDPNPQEMVLKNVTENFNMWKNDMADQMHEDVISLWDQSLKPCVKLTPLCVTLNCIDANATASNATASNSSIIEGMKNCSFNITTELRDKIEKKNALFYKLDIVQLDGNSSQYRLINCNTSVITQACPKVSFDPIPIHYCAPAGYAILKCNNKTFNGTGPCNNVSTVQCTHGIKPVVSTQLLLNGSLAEGEIIIRSENITNSAKTIIVHLNESVKIECTRPSNNTRTSIRIGPGQAFYATGQVIGDIRKAHCNISESKWNETLQRVSKKLKEYFPHKNITFQPSSGGDLEITTHSFNCGGEFFYCNTSSLFNRTYMANSTETNSTRTITLHCRIKQIINMWQEVGRAMYAPPIAGNITCISNITGLLLTRDGGNNNTTETFRPGGGNMKDNWRSELYKYKVVKIEPLGVAPTRCKRRVVGRRRRRRAVGIGAVFLGFLGAAGSTMGAASMTLTVQARNLLSGIVQQQSNLLRAPEAQQHLLKLTVWGIKQLQARVLAVERYLRDQQLLGIWGCSGKLICCTNVPWNSSWSNRNLSEIWDNMTWLQWDKEISNYTQIIYGLLEESQNQQEKNEQDLLALD

SEQ ID NO: 237 - protein, 662 aa, Artificial Sequence
  Description of Artificial Sequence: Synthetic polypeptide
MGSLQPLATLYLLGMLVASVLAAENLWVTVYYGVPVWKEAKTTLFCASDAKAYEKEVHNVWATHACVPTDPNPQEMVLENVTENFNMWKNDMADQMHEDVISLWDQSLKPCVKLTPLCVTLNCTDANATASNTNATASNINATASKSSIIEEMKNCSFNITTELRDKREKKYALFYKLDIVQLDGNSSQYRLINCNTSVITQACPKVSFDPIPIHYCAPAGYAILKCNNKTFNGTGPCNNVSTVQCTHGIKPVVSTQLLLNGSLAEGEIIIRSENITDNSKTIIVHLNESVKIECTRPSNNTRTSIRIGPGQAFYATGQVIGDIREAHCNISESKWNETLQRVSKKLKEYFPDKNITFQPSSGGDPEITTHSFNCGGEFFYCNTSSLFNRTYMANSTETNSTRTITLHCRIKQIINMWQEVGRAMYAPPIAGNITCISNITGLLLTRDGGENTRDGGNNNTETFRPEGGNMKDNWRSELYKYKVVKIEPLGVAPTRCKRRVVGRRRRRRAVGIGAVFLGFLGAAGSTMGAASMTLTVQARNLLSGIVQQQSNLLRAPEAQQHLLKLTVWGIKQLQARVLAVERYLRDQQLLGIWGCSGKLICCTNVPWNSSWSNRNLSEIWDNMTWLQWDKEISNYTQIIYGLLEESQNQQEKNEQDLLALD

SEQ ID NO: 238 - protein, 647 aa, Artificial Sequence
  Description of Artificial Sequence: Synthetic polypeptide
MPMGSLQPLATLYLLGMLVASVLAAENLWVTVYYGVPVWKEAKTTLFCASDAKAYEKEVHNVWATHACVPTDPNPQEMVLKNVTENFNMWKNDMVDQMHEDVISLWDQSLKPCVKLTPLCVTLNCTNATASNSSIIEGMKNCSFNITTELRDKREKKNALFYKLDIVQLDGNSSQYRLINCNTSVCTQACPKVSFDPIPIHYCAPAGYAILKCNNKTFTGTGPCNNVSTVQCTHGIKPVVSTQLLLNGSLAEGEIIIRSENITNNVKTIIVHLNESVKIECTRPNNKTRTSIRIGPGQAFYATGQVIGDIREAYCNINESKWNETLQRVSKKLKEYFPHKNITFQPSSGGDLEITTHSFNCGGEFFYCNTSSLFNRTYMANSTDMANSTETNSTRTITIHCRIKQIINMWQEVGRCMYAPPIAGNITCISNITGLLLTRDGGKNNTETFRPGGGNMKDNWRSELYKYKVVKIEPLGVAPTRCKRRVVGRRRRRRAVGIGAVFLGFLGAAGSTMGAASMTLTVQARNLLSGIVQQQSNLLRAPEAQQHLLKLTVWGIKQLQARVLAVERYLRDQQLLGIWGCSGKLICCTNVPWNSSWSNRNLSEIWDNMTWLQWDKEISNYTQIIYGLLEESQNQQEKNEQDLLALD

SEQ ID NO: 239 - protein, 658 aa, Artificial Sequence
  Description of Artificial Sequence: Synthetic polypeptide
MGSLQPLATLYLLGMLVASVLAAENLWVTVYYGVPVWKEAKTTLFCASDAKAYEKEVHNVWATHACVPTDPNPQEMVLKNVTENFNMWKNDMVDQMHEDVISLWDQSLKPCVKLTPLCVTLNCTNANATASNSSIIEGMNSSIIEGMKNCSFNITTELRDKREKKNALFYKLDIVQLDGNSSQYRLINCNTSVCTQACPKVSFDPIPIHYCAPAGYAILKCNNKTFNGTGPCNNVSTVQCTHGIKPVVSTQLLLNGSLAEGEIIIRSENITDNGKTIIVHLNESVKIECTRPSNNTRTSIRIGPGQAFYATGQVIGDIREAHCNISESKWNETLQRVSEKLKEYFPHKNITFQPSSGGDLEITTHSFNCGGEFFYCNTSSLFNRTYMATSTDMANSTETNSTRIITIRCRIKQIINMWQEVGRCMYAPPIAGNITCISNITGLLLTRDGGKNNTETFETFRPGGGNMKDNWRSELYKYKVVKIEPLGVAPTRCKRRVVGRRRRRRAVGIGAVFLGFLGAAGSTMGAASMTLTVQARNLLSGIVQQQSNLLRAPEAQQHLLKLTVWGIKQLQARVLAVERYLRDQQLLGIWGCSGKLICCTNVPWNSSWSNRNLSEIWDNMTWLQWDKEISNYTQIIYGLLEESQNQQEKNEQDLLALD

SEQ ID NO: 240 - protein, 647 aa, Artificial Sequence
  Description of Artificial Sequence: Synthetic polypeptide
MGSLQPLATLYLLGMLVASVLAAENLWVTVYYGVPVWKEAKTTLFCASDAKAYEKEVHNVWATHACVPTDPNPQEMVLKNVTENFNMWKNDMADQMHEDVISLWDQSLKPCVKLTPLCVTLNCIDANATASNATASNSSIIEGMKNCSFNITTELRDKIEKKNALFYKLDIVQLDGNSSQYRLINCNTSVCTQACPKVSFDPIPIHYCAPAGYAILKCNNKTFNGTGPCNNVSTVQCTHGIKPVVSTQLLLNGSLAEGEIIIRSENITNSAKTIIVHLNESVKIECTRPSNNTRTSIRIGPGQAFYATGQVIGDIRKAHCNISESKWNETLQRVSKKLKEYFPHKNITFQPSSGGDLEITTHSFNCGGEFFYCNTSSLFNRTYMANSTETNSTRTITLHCRIKQIINMWQEVGRCMYAPPIAGNITCISNITGLLLTRDGGNNNTTETFRPGGGNMKDNWRSELYKYKVVKIEPLGVAPTRCKRRVVGRRRRRRAVGIGAVFLGFLGAAGSTMGAASMTLTVQARNLLSGIVQQQSNLLRAPEAQQHLLKLTVWGIKQLQARVLAVERYLRDQQLLGIWGCSGKLICCTNVPWNSSWSNRNLSEIWDNMTWLQWDKEISNYTQIIYGLLEESQNQQEKNEQDLLALD

SEQ ID NO: 241 - protein, 662 aa, Artificial Sequence
  Description of Artificial Sequence: Synthetic polypeptide
MGSLQPLATLYLLGMLVASVLAAENLWVTVYYGVPVWKEAKTTLFCASDAKAYEKEVHNVWATHACVPTDPNPQEMVLENVTENFNMWKNDMADQMHEDVISLWDQSLKPCVKLTPLCVTLNCTDANATASNTNATASNINATASKSSIIEEMKNCSFNITTELRDKREKKYALFYKLDIVQLDGNSSQYRLINCNTSVCTQACPKVSFDPIPIHYCAPAGYAILKCNNKTFNGTGPCNNVSTVQCTHGIKPVVSTQLLLNGSLAEGEIIIRSENITDNSKTIIVHLNESVKIECTRPSNNTRTSIRIGPGQAFYATGQVIGDIREAHCNISESKWNETLQRVSKKLKEYFPDKNITFQPSSGGDPEITTHSFNCGGEFFYCNTSSLFNRTYMANSTETNSTRTITLHCRIKQIINMWQEVGRCMYAPPIAGNITCISNITGLLLTRDGGENTRDGGNNNTETFRPEGGNMKDNWRSELYKYKVVKIEPLGVAPTRCKRRVVGRRRRRRAVGIGAVFLGFLGAAGSTMGAASMTLTVQARNLLSGIVQQQSNLLRAPEAQQHLLKLTVWGIKQLQARVLAVERYLRDQQLLGIWGCSGKLICCTNVPWNSSWSNRNLSEIWDNMTWLQWDKEISNYTQIIYGLLEESQNQQEKNEQDLLALD

SEQ ID NO: 242 - protein, 647 aa, Artificial Sequence
  Description of Artificial Sequence: Synthetic polypeptide
MPMGSLQPLATLYLLGMLVASVLAAENLWVTVYYGVPVWKEAKTTLFCASDAKAYEKKVHNVWATHACVPTDPNPQEMVLKNVTENFNMWKNDMVDQMHEDVISLWDQSLKPCVKLTPLCVTLNCTNATASNSSIIEGMKNCSFNITTELRDKREKKNALFYKLDIVQLDGNSSQYRLINCNTSVITQACPKVSFDPIPIHYCAPAGYAILKCNNKTFTGTGPCNNVSTVQCTHGIKPVVSTQLLLNGSLAEGEIIIRSENITKNVKTIIVHLNESVKIECTRPNNKTRTSIRIGPGQWFYATGQVIGDIREAYCNINESKWNETLQRVSKKLKEYFPHKNITFQPSSGGDLEITTHSFNCGGEFFYCNTSSLFNRTYMANSTDMANSTETNSTRTITIHCRIKQIINMWQEVGRAMYAPPIAGNITCISNITGLLLTRDGGKNNTETFRPGGGNMKDNWRSELYKYKVVKIEPLGVAPTRCKRRVVGRRRRRRAVGIGAVFLGFLGAAGSTMGAASMTLTVQARNLLSGIVQQQSNLLRAPEAQQHLLKLTVWGIKQLQARVLAVERYLRDQQLLGIWGCSGKLICCTNVPWNSSWSNRNLSEIWDNMTWLQWDKEISNYTQIIYGLLEESQNQQEKNEQDLLALD

SEQ ID NO: 243 - protein, 647 aa, Artificial Sequence
  Description of Artificial Sequence: Synthetic polypeptide
MPMGSLQPLATLYLLGMLVASVLAAENLWVTVYYGVPVWKEAKTTLFCASDAKAYEKEVRNVWATHACVPTDPNPQEMVLKNVTENFNMWKNDMVDQMHEDVISLWDQSLKPCVKLTPLCVTLNCTNATASNSSIIEGMKNCSFNITTELRDKREKKNALFYKLDIVQLDGNSSQYRLINCNTSVITQACPKVSFDPIPIHYCAPAGYAILKCNNKTFTGTGPCNNVSTVQCTHGIKPVVSTQLLLNGSLAEGEIIIRSENITKNVKTIIVHLNESVKIECTRPNNKTRTSIRIGPGQWFYATGQVIGDIREAYCNINESKWNETLQRVSKKLKEYFPHKNITFQPSSGGDLEITTHSFNCGGEFFYCNTSSLFNRTYMANSTDMANSTETNSTRTITIHCRIKQIINMWQEVGRAMYAPPIAGNITCISNITGLLLTRDGGKNNTETFRPGGGNMKDNWRSELYKYKVVKIEPLGVAPTRCKRRVVGRRRRRRAVGIGAVFLGFLGAAGSTMGAASMTLTVQARNLLSGIVQQQSNLLRAPEAQQHLLKLTVWGIKQLQARVLAVERYLRDQQLLGIWGCSGKLICCTNVPWNSSWSNRNLSEIWDNMTWLQWDKEISNYTQIIYGLLEESQNQQEKNEQDLLALD

SEQ ID NO: 244 - protein, 647 aa, Artificial Sequence
  Description of Artificial Sequence: Synthetic polypeptide
MPMGSLQPLATLYLLGMLVASVLAAENLWVTVYYGVPVWKEAKTTLFCASDAKAYEKKVHNVWATHACVPTDPNPQEMVLKNVTENFNMWKNDMVDQMHEDVISLWDQSLKPCVKLTPLCVTLNCTNATASNSSIIEGMKNCSFNITTELRDKREKKNALFYKLDIVQLDGNSSQYRLINCNTSVITQACPKVSFDPIPIHYCAPAGYAILKCNNKTFTGTGPCNNVSTVQCTHGIKPVVSTQLLLNGSLAEGEIIIRSENITDNGKTIIVHLNESVKIECTRPNNKTRTSIRIGPGQWFYATGQVIGDIREAYCNINESKWNETLQRVSKKLKEYFPHKNITFQPSSGGDLEITTHSFNCGGEFFYCNTSSLFNRTYMANSTDMANSTETNSTRTITIHCRIKQIINMWQEVGRAMYAPPIAGNITCISNITGLLLTRDGGKNNTETFRPGGGNMKDNWRSELYKYKVVKIEPLGVAPTRCKRRVVGRRRRRRAVGIGAVFLGFLGAAGSTMGAASMTLTVQARNLLSGIVQQQSNLLRAPEAQQHLLKLTVWGIKQLQARVLAVERYLRDQQLLGIWGCSGKLICCTNVPWNSSWSNRNLSEIWDNMTWLQWDKEISNYTQIIYGLLEESQNQQEKNEQDLLALD

SEQ ID NO: 245 - protein, 647 aa, Artificial Sequence
  Description of Artificial Sequence: Synthetic polypeptide
MPMGSLQPLATLYLLGMLVASVLAAENLWVTVYYGVPVWKEAKTTLFCASDAKAYEKEVRNVWATHACVPTDPNPQEMVLKNVTENFNMWKNDMVDQMHEDVISLWDQSLKPCVKLTPLCVTLNCTNATASNSSIIEGMKNCSFNITTELRDKREKKNALFYKLDIVQLDGNSSQYRLINCNTSVITQACPKVSFDPIPIHYCAPAGYAILKCNNKTFTGTGPCNNVSTVQCTHGIKPVVSTQLLLNGSLAEGEIIIRSENITDNGKTIIVHLNESVKIECTRPNNKTRTSIRIGPGQWFYATGQVIGDIREAYCNINESKWNETLQRVSKKLKEYFPHKNITFQPSSGGDLEITTHSFNCGGEFFYCNTSSLFNRTYMANSTDMANSTETNSTRTITIHCRIKQIINMWQEVGRAMYAPPIAGNITCISNITGLLLTRDGGKNNTETFRPGGGNMKDNWRSELYKYKVVKIEPLGVAPTRCKRRVVGRRRRRRAVGIGAVFLGFLGAAGSTMGAASMTLTVQARNLLSGIVQQQSNLLRAPEAQQHLLKLTVWGIKQLQARVLAVERYLRDQQLLGIWGCSGKLICCTNVPWNSSWSNRNLSEIWDNMTWLQWDKEISNYTQIIYGLLEESQNQQEKNEQDLLALD

SEQ ID NO: 246 - protein, 660 aa, Artificial Sequence
  Description of Artificial Sequence: Synthetic polypeptide
MPMGSLQPLATLYLLGMLVASVLAAENLWVTVYYGVPVWKEAKTTLFCASDAKAYEKKVHNVWATHACVPTDPNPQEMVLKNVTENFNMWKNDMVDQMHEDVISLWDQSLKPCVKLTPLCVTLNCTNANATASNSSIIEGMNSSIIEGMKNCSFNITTELRDKREKKNALFYKLDIVQLDGNSSQYRLINCNTSVITQACPKVSFDPIPIHYCAPAGYAILKCNNKTFNGTGPCNNVSTVQCTHGIKPVVSTQLLLNGSLAEGEIIIRSENITDNGKTIIVHLNESVKIECTRPSNNTRTSIRIGPGQWFYATGQVIGDIREAHCNISESKWNETLQRVSEKLKEYFPHKNITFQPSSGGDLEITTHSFNCGGEFFYCNTSSLFNRTYMATSTDMANSTETNSTRIITIRCRIKQIINMWQEVGRAMYAPPIAGNITCISNITGLLLTRDGGKNNTETFETFRPGGGNMKDNWRSELYKYKVVKIEPLGVAPTRCKRRVVGRRRRRRAVGIGAVFLGFLGAAGSTMGAASMTLTVQARNLLSGIVQQQSNLLRAPEAQQHLLKLTVWGIKQLQARVLAVERYLRDQQLLGIWGCSGKLICCTNVPWNSSWSNRNLSEIWDNMTWLQWDKEISNYTQIIYGLLEESQNQQEKNEQDLLALD

SEQ ID NO: 247 - protein, 660 aa, Artificial Sequence
  Description of Artificial Sequence: Synthetic polypeptide
MPMGSLQPLATLYLLGMLVASVLAAENLWVTVYYGVPVWKEAKTTLFCASDAKAYEKEVRNVWATHACVPTDPNPQEMVLKNVTENFNMWKNDMVDQMHEDVISLWDQSLKPCVKLTPLCVTLNCTNANATASNSSIIEGMNSSIIEGMKNCSFNITTELRDKREKKNALFYKLDIVQLDGNSSQYRLINCNTSVITQACPKVSFDPIPIHYCAPAGYAILKCNNKTFNGTGPCNNVSTVQCTHGIKPVVSTQLLLNGSLAEGEIIIRSENITDNGKTIIVHLNESVKIECTRPSNNTRTSIRIGPGQWFYATGQVIGDIREAHCNISESKWNETLQRVSEKLKEYFPHKNITFQPSSGGDLEITTHSFNCGGEFFYCNTSSLFNRTYMATSTDMANSTETNSTRIITIRCRIKQIINMWQEVGRAMYAPPIAGNITCISNITGLLLTRDGGKNNTETFETFRPGGGNMKDNWRSELYKYKVVKIEPLGVAPTRCKRRVVGRRRRRRAVGIGAVFLGFLGAAGSTMGAASMTLTVQARNLLSGIVQQQSNLLRAPEAQQHLLKLTVWGIKQLQARVLAVERYLRDQQLLGIWGCSGKLICCTNVPWNSSWSNRNLSEIWDNMTWLQWDKEISNYTQIIYGLLEESQNQQEKNEQDLLALD

SEQ ID NO: 248 - protein, 649 aa, Artificial Sequence
  Description of Artificial Sequence: Synthetic polypeptide
MPMGSLQPLATLYLLGMLVASVLAAENLWVTVYYGVPVWKEAKTTLFCASDAKAYEKKVHNVWATHACVPTDPNPQEMVLKNVTENFNMWKNDMADQMHEDVISLWDQSLKPCVKLTPLCVTLNCIDANATASNATASNSSIIEGMKNCSFNITTELRDKIEKKNALFYKLDIVQLDGNSSQYRLINCNTSVITQACPKVSFDPIPIHYCAPAGYAILKCNNKTFNGTGPCNNVSTVQCTHGIKPVVSTQLLLNGSLAEGEIIIRSENITNSAKTIIVHLNESVKIECTRPSNNTRTSIRIGPGQWFYATGQVIGDIRKAHCNISESKWNETLQRVSKKLKEYFPHKNITFQPSSGGDLEITTHSFNCGGEFFYCNTSSLFNRTYMANSTETNSTRTITLHCRIKQIINMWQEVGRAMYAPPIAGNITCISNITGLLLTRDGGNNNTTETFRPGGGNMKDNWRSELYKYKVVKIEPLGVAPTRCKRRVVGRRRRRRAVGIGAVFLGFLGAAGSTMGAASMTLTVQARNLLSGIVQQQSNLLRAPEAQQHLLKLTVWGIKQLQARVLAVERYLRDQQLLGIWGCSGKLICCTNVPWNSSWSNRNLSEIWDNMTWLQWDKEISNYTQIIYGLLEESQNQQEKNEQDLLALD

SEQ ID NO: 249 - protein, 649 aa, Artificial Sequence
  Description of Artificial Sequence: Synthetic polypeptide
MPMGSLQPLATLYLLGMLVASVLAAENLWVTVYYGVPVWKEAKTTLFCASDAKAYEKEVRNVWATHACVPTDPNPQEMVLKNVTENFNMWKNDMADQMHEDVISLWDQSLKPCVKLTPLCVTLNCIDANATASNATASNSSIIEGMKNCSFNITTELRDKIEKKNALFYKLDIVQLDGNSSQYRLINCNTSVITQACPKVSFDPIPIHYCAPAGYAILKCNNKTFNGTGPCNNVSTVQCTHGIKPVVSTQLLLNGSLAEGEIIIRSENITNSAKTIIVHLNESVKIECTRPSNNTRTSIRIGPGQWFYATGQVIGDIRKAHCNISESKWNETLQRVSKKLKEYFPHKNITFQPSSGGDLEITTHSFNCGGEFFYCNTSSLFNRTYMANSTETNSTRTITLHCRIKQIINMWQEVGRAMYAPPIAGNITCISNITGLLLTRDGGNNNTTETFRPGGGNMKDNWRSELYKYKVVKIEPLGVAPTRCKRRVVGRRRRRRAVGIGAVFLGFLGAAGSTMGAASMTLTVQARNLLSGIVQQQSNLLRAPEAQQHLLKLTVWGIKQLQARVLAVERYLRDQQLLGIWGCSGKLICCTNVPWNSSWSNRNLSEIWDNMTWLQWDKEISNYTQIIYGLLEESQNQQEKNEQDLLALD

SEQ ID NO: 250 - protein, 664 aa, Artificial Sequence
  Description of Artificial Sequence: Synthetic polypeptide
MPMGSLQPLATLYLLGMLVASVLAAENLWVTVYYGVPVWKEAKTTLFCASDAKAYEKKVHNVWATHACVPTDPNPQEMVLENVTENFNMWKNDMADQMHEDVISLWDQSLKPCVKLTPLCVTLNCTDANATASNTNATASNINATASKSSIIEEMKNCSFNITTELRDKREKKYALFYKLDIVQLDGNSSQYRLINCNTSVITQACPKVSFDPIPIHYCAPAGYAILKCNNKTFNGTGPCNNVSTVQCTHGIKPVVSTQLLLNGSLAEGEIIIRSENITDNSKTIIVHLNESVKIECTRPSNNTRTSIRIGPGQWFYATGQVIGDIREAHCNISESKWNETLQRVSKKLKEYFPDKNITFQPSSGGDPEITTHSFNCGGEFFYCNTSSLFNRTYMANSTETNSTRTITLHCRIKQIINMWQEVGRAMYAPPIAGNITCISNITGLLLTRDGGENTRDGGNNNTETFRPEGGNMKDNWRSELYKYKVVKIEPLGVAPTRCKRRVVGRRRRRRAVGIGAVFLGFLGAAGSTMGAASMTLTVQARNLLSGIVQQQSNLLRAPEAQQHLLKLTVWGIKQLQARVLAVERYLRDQQLLGIWGCSGKLICCTNVPWNSSWSNRNLSEIWDNMTWLQWDKEISNYTQIIYGLLEESQNQQEKNEQDLLALD

SEQ ID NO: 251 - protein, 664 aa, Artificial Sequence
  Description of Artificial Sequence: Synthetic polypeptide
MPMGSLQPLATLYLLGMLVASVLAAENLWVTVYYGVPVWKEAKTTLFCASDAKAYEKEVRNVWATHACVPTDPNPQEMVLENVTENFNMWKNDMADQMHEDVISLWDQSLKPCVKLTPLCVTLNCTDANATASNTNATASNINATASKSSIIEEMKNCSFNITTELRDKREKKYALFYKLDIVQLDGNSSQYRLINCNTSVITQACPKVSFDPIPIHYCAPAGYAILKCNNKTFNGTGPCNNVSTVQCTHGIKPVVSTQLLLNGSLAEGEIIIRSENITDNSKTIIVHLNESVKIECTRPSNNTRTSIRIGPGQWFYATGQVIGDIREAHCNISESKWNETLQRVSKKLKEYFPDKNITFQPSSGGDPEITTHSFNCGGEFFYCNTSSLFNRTYMANSTETNSTRTITLHCRIKQIINMWQEVGRAMYAPPIAGNITCISNITGLLLTRDGGENTRDGGNNNTETFRPEGGNMKDNWRSELYKYKVVKIEPLGVAPTRCKRRVVGRRRRRRAVGIGAVFLGFLGAAGSTMGAASMTLTVQARNLLSGIVQQQSNLLRAPEAQQHLLKLTVWGIKQLQARVLAVERYLRDQQLLGIWGCSGKLICCTNVPWNSSWSNRNLSEIWDNMTWLQWDKEISNYTQIIYGLLEESQNQQEKNEQDLLALD

SEQ ID NO: 252 - protein, 659 aa, Artificial Sequence
  Description of Artificial Sequence: Synthetic polypeptide
MPMGSLQPLATLYLLGMLVASVLAAENLWVTVYYGVPVWKEAKTTLFCASDAKAYEKKVHNVWATHACVPTDPNPQEMVLKNVTENFNMWKNDMVDQMHEDVISLWDQSLTPCVKLTPLCVTLNCTDANDTASNSSIIKGMNNSIVGEMKNCSFNITTELRDKREKKNALFYKLDIVQLDGNSSEYRLINCNTSVITQACPKVSFDPIPIHYCAPAGYAILKCNNKTFNGTGPCNNVSTVQCTHGIKPVVSTQLLLNGSLAEGEIIIRSENITDNAKTIIVHLNESVKIECTRPSNNTRTSIRIGPGQWFYATGQVIGDIRKAHCNISESKWNETLQRVSKKLKEYFPDKNITFQPSSGGDPEITTHSFNCGGEFFYCNTSSLFNRTYMANSTDMANSAETNSTRTITLHCRIKQIINMWQEVGRAMYAPPIAGNITCISNITGLLLTRDGGNSSTETETFRPGGGNMKDNWRSELYKYKVVKIEPLGVAPTRCKRRVVGRRRRRRAVGIGAVFLGFLGAAGSTMGAASMTLTVQARNLLSGIVQQQSNLLRAPEAQQHLLKLTVWGIKQLQARVLAVERYLRDQQLLGIWGCSGKLICCTNVPWNSSWSNRNLSEIWDNMTWLQWDKEISNYTQIIYGLLEESQNQQEKNEQDLLALD

SEQ ID NO: 253 - protein, 659 aa, Artificial Sequence
  Description of Artificial Sequence: Synthetic polypeptide
MPMGSLQPLATLYLLGMLVASVLAAENLWVTVYYGVPVWKEAKTTLFCASDAKAYEKEVRNVWATHACVPTDPNPQEMVLKNVTENFNMWKNDMVDQMHEDVISLWDQSLTPCVKLTPLCVTLNCTDANDTASNSSIIKGMNNSIVGEMKNCSFNITTELRDKREKKNALFYKLDIVQLDGNSSEYRLINCNTSVITQACPKVSFDPIPIHYCAPAGYAILKCNNKTFNGTGPCNNVSTVQCTHGIKPVVSTQLLLNGSLAEGEIIIRSENITDNAKTIIVHLNESVKIECTRPSNNTRTSIRIGPGQWFYATGQVIGDIRKAHCNISESKWNETLQRVSKKLKEYFPDKNITFQPSSGGDPEITTHSFNCGGEFFYCNTSSLFNRTYMANSTDMANSAETNSTRTITLHCRIKQIINMWQEVGRAMYAPPIAGNITCISNITGLLLTRDGGNSSTETETFRPGGGNMKDNWRSELYKYKVVKIEPLGVAPTRCKRRVVGRRRRRRAVGIGAVFLGFLGAAGSTMGAASMTLTVQARNLLSGIVQQQSNLLRAPEAQQHLLKLTVWGIKQLQARVLAVERYLRDQQLLGIWGCSGKLICCTNVPWNSSWSNRNLSEIWDNMTWLQWDKEISNYTQIIYGLLEESQNQQEKNEQDLLALD

SEQ ID NO: 254 - protein, 647 aa, Artificial Sequence
  Description of Artificial Sequence: Synthetic polypeptide
MPMGSLQPLATLYLLGMLVASVLAAENLWVTVYYGVPVWKEAKTTLFCASDAKAYEKKVHNVWATHACVPTDPNPQEMVLKNVTENFNMWKNDMVDQMHEDVISLWDQSLKPCVKLTPLCVTLNCTNATASNNSIIEGMKNCSFNITTELRDKREKKNALFYKLDIVQLDGNSSQYRLINCNTSVITQACPKVSFDPIPIHYCAPAGYAILKCNNKTFTGTGPCNNVSTVQCTHGIKPVVSTQLLLNGSLAEGEIIIRSENITNNAKTIIVHLNESVKIECTRPNNKTRTSIRIGPGQWFYATGQVIGDIRKAYCNISESKWNETLQRVSKKLKEYFPHKNITFQPSSGGDLEITTHSFNCGGEFFYCNTSSLFNRTYMANSTDMANSTETNSTRTITLHCRIKQIINMWQEVGRAMYAPPIAGNITCISNITGLLLTRDGGKNNTETFRPGGGNMKDNWRSELYKYKVVKIEPLGVAPTRCKRRVVGRRRRRRAVGIGAVFLGFLGAAGSTMGAASMTLTVQARNLLSGIVQQQSNLLRAPEAQQHLLKLTVWGIKQLQARVLAVERYLRDQQLLGIWGCSGKLICCTNVPWNSSWSNRNLSEIWDNMTWLQWDKEISNYTQIIYGLLEESQNQQEKNEQDLLALD

SEQ ID NO: 255 - protein, 647 aa, Artificial Sequence
  Description of Artificial Sequence: Synthetic polypeptide
MPMGSLQPLATLYLLGMLVASVLAAENLWVTVYYGVPVWKEAKTTLFCASDAKAYEKEVRNVWATHACVPTDPNPQEMVLKNVTENFNMWKNDMVDQMHEDVISLWDQSLKPCVKLTPLCVTLNCTNATASNNSIIEGMKNCSFNITTELRDKREKKNALFYKLDIVQLDGNSSQYRLINCNTSVITQACPKVSFDPIPIHYCAPAGYAILKCNNKTFTGTGPCNNVSTVQCTHGIKPVVSTQLLLNGSLAEGEIIIRSENITNNAKTIIVHLNESVKIECTRPNNKTRTSIRIGPGQWFYATGQVIGDIRKAYCNISESKWNETLQRVSKKLKEYFPHKNITFQPSSGGDLEITTHSFNCGGEFFYCNTSSLFNRTYMANSTDMANSTETNSTRTITLHCRIKQIINMWQEVGRAMYAPPIAGNITCISNITGLLLTRDGGKNNTETFRPGGGNMKDNWRSELYKYKVVKIEPLGVAPTRCKRRVVGRRRRRRAVGIGAVFLGFLGAAGSTMGAASMTLTVQARNLLSGIVQQQSNLLRAPEAQQHLLKLTVWGIKQLQARVLAVERYLRDQQLLGIWGCSGKLICCTNVPWNSSWSNRNLSEIWDNMTWLQWDKEISNYTQIIYGLLEESQNQQEKNEQDLLALD

SEQ ID NO: 256 - protein, 650 aa, Artificial Sequence
  Description of Artificial Sequence: Synthetic polypeptide
MPMGSLQPLATLYLLGMLVASVLAAENLWVTVYYGVPVWKEAKTTLFCASDAKAYEKKVHNVWATHACVPTDPNPQEMVLKNVTENFNMWKNDMVDQMHEDVISLWDQSLKPCVKLTPLCVTLNCTNATNATASNSSIIEGMKNCSFNITTELRDKREKKNALFYKLDIVQLDGNSSQYRLINCNTSVITQACPKVSFDPIPIHYCAPAGYAILKCNNKTFTGTGPCNNVSTVQCTHGIKPVVSTQLLLNGSLAEGEIIIRSENITNNDKTIIVHLNESVKIECTRPSNKTRTSIRIGPGQWFYATGQVIGDIREAYCNISESKWNETLQRVSKKLKEYFPHKNITFQPSSGGDLEITTHSFNCGGEFFYCNTSSLFNRTYMANSTDMANSTETNSTRNITIHCRIKQIINMWQEVGRAMYAPPIAGNITCISNITGLLLTRDGGKNDTETFRPGGGNMKDNWRSELYKYKVVKIEPLGVAPTRCKRRVVGRRRRRRAVGIGAVFLGFLGAAGSTMGAASMTLTVQARNLLSGIVQQQSNLLRAPEAQQHLLKLTVWGIKQLQARVLAVERYLRDQQLLGIWGCSGKLICCTNVPWNSSWSNRNLSEIWDNMTWLQWDKEISNYTQIIYGLLEESQNQQEKNEQDLLALD

SEQ ID NO: 257 - protein, 650 aa, Artificial Sequence
  Description of Artificial Sequence: Synthetic polypeptide
MPMGSLQPLATLYLLGMLVASVLAAENLWVTVYYGVPVWKEAKTTLFCASDAKAYEKEVRNVWATHACVPTDPNPQEMVLKNVTENFNMWKNDMVDQMHEDVISLWDQSLKPCVKLTPLCVTLNCTNATNATASNSSIIEGMKNCSFNITTELRDKREKKNALFYKLDIVQLDGNSSQYRLINCNTSVITQACPKVSFDPIPIHYCAPAGYAILKCNNKTFTGTGPCNNVSTVQCTHGIKPVVSTQLLLNGSLAEGEIIIRSENITNNDKTIIVHLNESVKIECTRPSNKTRTSIRIGPGQWFYATGQVIGDIREAYCNISESKWNETLQRVSKKLKEYFPHKNITFQPSSGGDLEITTHSFNCGGEFFYCNTSSLFNRTYMANSTDMANSTETNSTRNITIHCRIKQIINMWQEVGRAMYAPPIAGNITCISNITGLLLTRDGGKNDTETFRPGGGNMKDNWRSELYKYKVVKIEPLGVAPTRCKRRVVGRRRRRRAVGIGAVFLGFLGAAGSTMGAASMTLTVQARNLLSGIVQQQSNLLRAPEAQQHLLKLTVWGIKQLQARVLAVERYLRDQQLLGIWGCSGKLICCTNVPWNSSWSNRNLSEIWDNMTWLQWDKEISNYTQIIYGLLEESQNQQEKNEQDLLALD

SEQ ID NO: 258 - protein, 658 aa, Artificial Sequence
  Description of Artificial Sequence: Synthetic polypeptide
MPMGSLQPLATLYLLGMLVASVLAAENLWVTVYYGVPVWKEAKTTLFCASDAKAYEKKVHNVWATHACVPTDPNPQEMVLKNVTENFNMWKNDMVDQMHEDVISLWDQSLKPCVKLTPLCVTLNCTNATTNATASNSSIIEGMKNCSFNITTELRDKREKKNALFYKLDIVQLDGNSSQYRLINCNTSVITQACPKVSFDPIPIHYCAPAGYAILKCNNKTFTGTGPCNNVSTVQCTHGIKPVVSTQLLLNGSLAEGEIIIRSENITNNAKTIIVHLNESVKIECTRPNNKTRTSIRIGPGQWFYATGQVIGDIREAYCNISESKWNETLQRVSKKLKEYFPHKNITFQPSSGGDLEITTHSFNCGGEFFYCNTSSLFNRTYMANSTDMANSTETNSTRIITIHCRIKQIINMWQEVGRAMYAPPIAGNITCISNITGLLLTRDGGKNTRDGGKNNTETFRPGGGNMKDNWRSELYKYKVVKIEPLGVAPTRCKRRVVGRRRRRRAVGIGAVFLGFLGAAGSTMGAASMTLTVQARNLLSGIVQQQSNLLRAPEAQQHLLKLTVWGIKQLQARVLAVERYLRDQQLLGIWGCSGKLICCTNVPWNSSWSNRNLSEIWDNMTWLQWDKEISNYTQIIYGLLEESQNQQEKNEQDLLALD

SEQ ID NO: 259 - protein, 658 aa, Artificial Sequence
  Description of Artificial Sequence: Synthetic polypeptide
MPMGSLQPLATLYLLGMLVASVLAAENLWVTVYYGVPVWKEAKTTLFCASDAKAYEKEVRNVWATHACVPTDPNPQEMVLKNVTENFNMWKNDMVDQMHEDVISLWDQSLKPCVKLTPLCVTLNCTNATTNATASNSSIIEGMKNCSFNITTELRDKREKKNALFYKLDIVQLDGNSSQYRLINCNTSVITQACPKVSFDPIPIHYCAPAGYAILKCNNKTFTGTGPCNNVSTVQCTHGIKPVVSTQLLLNGSLAEGEIIIRSENITNNAKTIIVHLNESVKIECTRPNNKTRTSIRIGPGQWFYATGQVIGDIREAYCNISESKWNETLQRVSKKLKEYFPHKNITFQPSSGGDLEITTHSFNCGGEFFYCNTSSLFNRTYMANSTDMANSTETNSTRIITIHCRIKQIINMWQEVGRAMYAPPIAGNITCISNITGLLLTRDGGKNTRDGGKNNTETFRPGGGNMKDNWRSELYKYKVVKIEPLGVAPTRCKRRVVGRRRRRRAVGIGAVFLGFLGAAGSTMGAASMTLTVQARNLLSGIVQQQSNLLRAPEAQQHLLKLTVWGIKQLQARVLAVERYLRDQQLLGIWGCSGKLICCTNVPWNSSWSNRNLSEIWDNMTWLQWDKEISNYTQIIYGLLEESQNQQEKNEQDLLALD

SEQ ID NO: 260 - protein, 647 aa, Artificial Sequence
  Description of Artificial Sequence: Synthetic polypeptide
MPMGSLQPLATLYLLGMLVASVLAAENLWVTVYYGVPVWKEAKTTLFCASDAKAYEKKVHNVWATHACVPTDPNPQEMVLKNVTENFNMWKNDMVDQMHEDVISLWDQSLKPCVKLTPLCVTLNCTNATASNSSIIEGMKNCSFNITTELRDKREKKNALFYKLDIVQLDGNSSQYRLINCNTSVITQACPKVSFDPIPIHYCAPAGYAILKCNNKTFTGTGPCNNVSTVQCTHGIKPVVSTQLLLNGSLAEGEIIIRSENITNNVKTIIVHLNESVKIECTRPNNKTRTSIRIGPGQWFYATGQVIGDIREAYCNINESKWNETLQRVSKKLKEYFPHKNITFQPSSGGDLEITTHSFNCGGEFFYCNTSSLFNRTYMANSTDMANSTETNSTRTITIHCRIKQIINMWQEVGRAMYAPPIAGNITCISNITGLLLTRDGGKNNTETFRPGGGNMKDNWRSELYKYKVVKIEPLGVAPTRCKRRVVGRRRRRRAVGIGAVFLGFLGAAGSTMGAASMTLTVQARNLLSGIVQQQSNLLRAPEAQQHLLKLTVWGIKQLQARVLAVERYLRDQQLLGIWGCSGKLICCTNVPWNSSWSNRNLSEIWDNMTWLQWDKEISNYTQIIYGLLEESQNQQEKNEQDLLALD

SEQ ID NO: 261 - protein, 647 aa, Artificial Sequence
  Description of Artificial Sequence: Synthetic polypeptide
MPMGSLQPLATLYLLGMLVASVLAAENLWVTVYYGVPVWKEAKTTLFCASDAKAYEKEVRNVWATHACVPTDPNPQEMVLKNVTENFNMWKNDMVDQMHEDVISLWDQSLKPCVKLTPLCVTLNCTNATASNSSIIEGMKNCSFNITTELRDKREKKNALFYKLDIVQLDGNSSQYRLINCNTSVITQACPKVSFDPIPIHYCAPAGYAILKCNNKTFTGTGPCNNVSTVQCTHGIKPVVSTQLLLNGSLAEGEIIIRSENITNNVKTIIVHLNESVKIECTRPNNKTRTSIRIGPGQWFYATGQVIGDIREAYCNINESKWNETLQRVSKKLKEYFPHKNITFQPSSGGDLEITTHSFNCGGEFFYCNTSSLFNRTYMANSTDMANSTETNSTRTITIHCRIKQIINMWQEVGRAMYAPPIAGNITCISNITGLLLTRDGGKNNTETFRPGGGNMKDNWRSELYKYKVVKIEPLGVAPTRCKRRVVGRRRRRRAVGIGAVFLGFLGAAGSTMGAASMTLTVQARNLLSGIVQQQSNLLRAPEAQQHLLKLTVWGIKQLQARVLAVERYLRDQQLLGIWGCSGKLICCTNVPWNSSWSNRNLSEIWDNMTWLQWDKEISNYTQIIYGLLEESQNQQEKNEQDLLALD

SEQ ID NO: 262 - protein, 651 aa, Artificial Sequence
  Description of Artificial Sequence: Synthetic polypeptide
MGSLQPLATLYLLGMLVASVLAAENLWVTVYYGVPVWKEAKTTLFCASDAKAYEKEVHNVWATHACVPTDPNPQEMVLKNVTENFNMWKNDMVDQMHEDVISLWDQSLKPCVKLTPLCVTLNCTNATTNATASNSSIIEGMKNCSFNITTELRDKREKKNALFYKLDIVQLDGNSSQYRLINCNTSVITQACPKVSFDPIPIHYCAPAGYAILKCNNKTFTGTGPCNNVSTVQCTHGIKPVVSTQLLLNGSLAEGEIIIRSENITNNAKTIIVHLNESVKIECTRPNNKTRTSIRIGPGQAFYATGQVIGDIREAHCNISESKWNETLQRVSKKLKEYFPHKNITFQPSSGGDLEITTHSFNCGGEFFYCNTSSLFNRTYMANSTDMANSTETNSTRTITIRCRIKQIINMWQEVGRAMYAPPIAGNITCISNITGLLLTRDGGKNNTDTETFRPGGGNMKDNWRSELYKYKVVKIEPLGVAPTRCKRRVVGRRRRRRAVGIGAVFLGFLGAAGSTMGAASMTLTVQARNLLSGIVQQQSNLLRAPEAQQHLLKLTVWGIKQLQARVLAVERYLRDQQLLGIWGCSGKLICCTNVPWNSSWSNRNLSEIWDNMTWLQWDKEISNYTQIIYGLLEESQNQQEKNEQDLLALD

SEQ ID NO: 263 - protein, 651 aa, Artificial Sequence
  Description of Artificial Sequence: Synthetic polypeptide
MGSLQPLATLYLLGMLVASVLAAENLWVTVYYGVPVWKEAKTTLFCASDAKAYEKEVHNVWATHACVPTDPNPQEMVLKNVTENFNMWKNDMVDQMHEDVISLWDQSLKPCVKLTPLCVTLNCTNATTNATASNSSIIEGMKNCSFNITTELRDKREKKNALFYKLDIVQLDGNSSQYRLINCNTSVCTQACPKVSFDPIPIHYCAPAGYAILKCNNKTFTGTGPCNNVSTVQCTHGIKPVVSTQLLLNGSLAEGEIIIRSENITNNAKTIIVHLNESVKIECTRPNNKTRTSIRIGPGQAFYATGQVIGDIREAHCNISESKWNETLQRVSKKLKEYFPHKNITFQPSSGGDLEITTHSFNCGGEFFYCNTSSLFNRTYMANSTDMANSTETNSTRTITIRCRIKQIINMWQEVGRCMYAPPIAGNITCISNITGLLLTRDGGKNNTDTETFRPGGGNMKDNWRSELYKYKVVKIEPLGVAPTRCKRRVVGRRRRRRAVGIGAVFLGFLGAAGSTMGAASMTLTVQARNLLSGIVQQQSNLLRAPEAQQHLLKLTVWGIKQLQARVLAVERYLRDQQLLGIWGCSGKLICCTNVPWNSSWSNRNLSEIWDNMTWLQWDKEISNYTQIIYGLLEESQNQQEKNEQDLLALD

SEQ ID NO: 264 - protein, 651 aa, Artificial Sequence
  Description of Artificial Sequence: Synthetic polypeptide
MGSLQPLATLYLLGMLVASVLAAENLWVTVYYGVPVWKEAKTTLFCASDAKAYEKKVHNVWATHACVPTDPNPQEMVLKNVTENFNMWKNDMVDQMHEDVISLWDQSLKPCVKLTPLCVTLNCTNATTNATASNSSIIEGMKNCSFNITTELRDKREKKNALFYKLDIVQLDGNSSQYRLINCNTSVITQACPKVSFDPIPIHYCAPAGYAILKCNNKTFTGTGPCNNVSTVQCTHGIKPVVSTQLLLNGSLAEGEIIIRSENITNNAKTIIVHLNESVKIECTRPNNKTRTSIRIGPGQWFYATGQVIGDIREAHCNISESKWNETLQRVSKKLKEYFPHKNITFQPSSGGDLEITTHSFNCGGEFFYCNTSSLFNRTYMANSTDMANSTETNSTRTITIRCRIKQIINMWQEVGRAMYAPPIAGNITCISNITGLLLTRDGGKNNTDTETFRPGGGNMKDNWRSELYKYKVVKIEPLGVAPTRCKRRVVGRRRRRRAVGIGAVFLGFLGAAGSTMGAASMTLTVQARNLLSGIVQQQSNLLRAPEAQQHLLKLTVWGIKQLQARVLAVERYLRDQQLLGIWGCSGKLICCTNVPWNSSWSNRNLSEIWDNMTWLQWDKEISNYTQIIYGLLEESQNQQEKNEQDLLALD

SEQ ID NO: 265 - protein, 651 aa, Artificial Sequence
  Description of Artificial Sequence: Synthetic polypeptide
MGSLQPLATLYLLGMLVASVLAAENLWVTVYYGVPVWKEAKTTLFCASDAKAYEKEVRNVWATHACVPTDPNPQEMVLKNVTENFNMWKNDMVDQMHEDVISLWDQSLKPCVKLTPLCVTLNCTNATTNATASNSSIIEGMKNCSFNITTELRDKREKKNALFYKLDIVQLDGNSSQYRLINCNTSVITQACPKVSFDPIPIHYCAPAGYAILKCNNKTFTGTGPCNNVSTVQCTHGIKPVVSTQLLLNGSLAEGEIIIRSENITNNAKTIIVHLNESVKIECTRPNNKTRTSIRIGPGQWFYATGQVIGDIREAHCNISESKWNETLQRVSKKLKEYFPHKNITFQPSSGGDLEITTHSFNCGGEFFYCNTSSLFNRTYMANSTDMANSTETNSTRTITIRCRIKQIINMWQEVGRAMYAPPIAGNITCISNITGLLLTRDGGKNNTDTETFRPGGGNMKDNWRSELYKYKVVKIEPLGVAPTRCKRRVVGRRRRRRAVGIGAVFLGFLGAAGSTMGAASMTLTVQARNLLSGIVQQQSNLLRAPEAQQHLLKLTVWGIKQLQARVLAVERYLRDQQLLGIWGCSGKLICCTNVPWNSSWSNRNLSEIWDNMTWLQWDKEISNYTQIIYGLLEESQNQQEKNEQDLLALD

SEQ ID NO: 266 - protein, 658 aa, Artificial Sequence
  Description of Artificial Sequence: Synthetic polypeptide
MGSLQPLATLYLLGMLVASVLAAENLWVTVYYGVPVWKEAKTTLFCASDAKAYEKEVHNVWATHACVPTDPNPQEMVLKNVTENFNMWENDMVDQMHEDVISLWDQSLKPCVKLTPLCVTLNCTDATASNATASNATASNSSIIEGMKNCSFNITTELRDKREKKNALFYKLDIVQLDGNSSQYRLINCNTSVITQACPKVSFDPIPIHYCAPAGYAILKCNNKTFNGTGPCNNVSTVQCTHGIKPVVSTQLLLNGSLAEGEIIIRSENITDNGKTIIVHLNESVKIECTRPSNNTRTSIRIGPGQAFYATGQVIGDIREAHCNISENKWNETLQRVSKKLKEYFPHKNITFQPSSGGDLEITTHSFNCGGEFFYCNTSSLFNRTYMANSTDMANSTETNSTRTITIRCRIKQIINMWQEVGRAMYAPPIAGNITCISNITGLLLTRDGGKNNTETFETFRPGGGNMKDNWRSELYKYKVVKIEPLGVAPTRCKRRVVGRRRRRRAVGIGAVFLGFLGAAGSTMGAASMTLTVQARNLLSGIVQQQSNLLRAPEAQQHLLKLTVWGIKQLQARVLAVERYLRDQQLLGIWGCSGKLICCTNVPWNSSWSNRNLSEIWDNMTWLQWDKEISNYTQIIYGLLEESQNQQEKNEQDLLALD

SEQ ID NO: 267 - protein, 658 aa, Artificial Sequence
  Description of Artificial Sequence: Synthetic polypeptide
MGSLQPLATLYLLGMLVASVLAAENLWVTVYYGVPVWKEAKTTLFCASDAKAYEKEVHNVWATHACVPTDPNPQEMVLKNVTENFNMWENDMVDQMHEDVISLWDQSLKPCVKLTPLCVTLNCTDATASNATASNATASNSSIIEGMKNCSFNITTELRDKREKKNALFYKLDIVQLDGNSSQYRLINCNTSVCTQACPKVSFDPIPIHYCAPAGYAILKCNNKTFNGTGPCNNVSTVQCTHGIKPVVSTQLLLNGSLAEGEIIIRSENITDNGKTIIVHLNESVKIECTRPSNNTRTSIRIGPGQAFYATGQVIGDIREAHCNISENKWNETLQRVSKKLKEYFPHKNITFQPSSGGDLEITTHSFNCGGEFFYCNTSSLFNRTYMANSTDMANSTETNSTRTITIRCRIKQIINMWQEVGRCMYAPPIAGNITCISNITGLLLTRDGGKNNTETFETFRPGGGNMKDNWRSELYKYKVVKIEPLGVAPTRCKRRVVGRRRRRRAVGIGAVFLGFLGAAGSTMGAASMTLTVQARNLLSGIVQQQSNLLRAPEAQQHLLKLTVWGIKQLQARVLAVERYLRDQQLLGIWGCSGKLICCTNVPWNSSWSNRNLSEIWDNMTWLQWDKEISNYTQIIYGLLEESQNQQEKNEQDLLALD

SEQ ID NO: 268 - protein, 658 aa, Artificial Sequence
  Description of Artificial Sequence: Synthetic polypeptide
MGSLQPLATLYLLGMLVASVLAAENLWVTVYYGVPVWKEAKTTLFCASDAKAYEKKVHNVWATHACVPTDPNPQEMVLKNVTENFNMWENDMVDQMHEDVISLWDQSLKPCVKLTPLCVTLNCTDATASNATASNATASNSSIIEGMKNCSFNITTELRDKREKKNALFYKLDIVQLDGNSSQYRLINCNTSVITQACPKVSFDPIPIHYCAPAGYAILKCNNKTFNGTGPCNNVSTVQCTHGIKPVVSTQLLLNGSLAEGEIIIRSENITDNGKTIIVHLNESVKIECTRPSNNTRTSIRIGPGQWFYATGQVIGDIREAHCNISENKWNETLQRVSKKLKEYFPHKNITFQPSSGGDLEITTHSFNCGGEFFYCNTSSLFNRTYMANSTDMANSTETNSTRTITIRCRIKQIINMWQEVGRAMYAPPIAGNITCISNITGLLLTRDGGKNNTETFETFRPGGGNMKDNWRSELYKYKVVKIEPLGVAPTRCKRRVVGRRRRRRAVGIGAVFLGFLGAAGSTMGAASMTLTVQARNLLSGIVQQQSNLLRAPEAQQHLLKLTVWGIKQLQARVLAVERYLRDQQLLGIWGCSGKLICCTNVPWNSSWSNRNLSEIWDNMTWLQWDKEISNYTQIIYGLLEESQNQQEKNEQDLLALD

SEQ ID NO: 269 - protein, 658 aa, Artificial Sequence
  Description of Artificial Sequence: Synthetic polypeptide
MGSLQPLATLYLLGMLVASVLAAENLWVTVYYGVPVWKEAKTTLFCASDAKAYEKEVRNVWATHACVPTDPNPQEMVLKNVTENFNMWENDMVDQMHEDVISLWDQSLKPCVKLTPLCVTLNCTDATASNATASNATASNSSIIEGMKNCSFNITTELRDKREKKNALFYKLDIVQLDGNSSQYRLINCNTSVITQACPKVSFDPIPIHYCAPAGYAILKCNNKTFNGTGPCNNVSTVQCTHGIKPVVSTQLLLNGSLAEGEIIIRSENITDNGKTIIVHLNESVKIECTRPSNNTRTSIRIGPGQWFYATGQVIGDIREAHCNISENKWNETLQRVSKKLKEYFPHKNITFQPSSGGDLEITTHSFNCGGEFFYCNTSSLFNRTYMANSTDMANSTETNSTRTITIRCRIKQIINMWQEVGRAMYAPPIAGNITCISNITGLLLTRDGGKNNTETFETFRPGGGNMKDNWRSELYKYKVVKIEPLGVAPTRCKRRVVGRRRRRRAVGIGAVFLGFLGAAGSTMGAASMTLTVQARNLLSGIVQQQSNLLRAPEAQQHLLKLTVWGIKQLQARVLAVERYLRDQQLLGIWGCSGKLICCTNVPWNSSWSNRNLSEIWDNMTWLQWDKEISNYTQIIYGLLEESQNQQEKNEQDLLALD

SEQ ID NO: 270 - protein, 647 aa, Artificial Sequence
  Description of Artificial Sequence: Synthetic polypeptide
MGSLQPLATLYLLGMLVASVLAAENLWVTVYYGVPVWKEAKTTLFCASDAKAYEKEVHNVWATHACVPTDPNPQEMVLKNVTENFNMWKNDMVDQMHEDVISLWDQSLKPCVKLTPLCVTLNCTDATASNATAINSSIIEGMKNCSFNITTELRDKREKKNALFYKLDIVQLDGNSSQYRLINCNTSVITQACPKVSFDPIPIHYCAPAGYAILKCNNKTFNGTGPCNNVSTVQCTHGIKPVVSTQLLLNGSLAEGEIIIRSENITNNAKTIIVHLNESVKIECTRPSNNTRTSIRIGPGQAFYATGQVIGDIREAHCNISESKWNETLQRVSKKLKEYFPHKNITFQPSSGGDLEITTHSFNCGGEFFYCNTSSLFNRTYMANSTETNSTRIITIRCRIKQIINMWQEVGRAMYAPPIAGNITCISNITGLLLTRDGGKNNTETFETFRPEGGNMKDNWRSELYKYKVVKIEPLGVAPTRCKRRVVGRRRRRRAVGIGAVFLGFLGAAGSTMGAASMTLTVQARNLLSGIVQQQSNLLRAPEAQQHLLKLTVWGIKQLQARVLAVERYLRDQQLLGIWGCSGKLICCTNVPWNSSWSNRNLSEIWDNMTWLQWDKEISNYTQIIYGLLEESQNQQEKNEQDLLALD

SEQ ID NO: 271 - protein, 647 aa, Artificial Sequence
  Description of Artificial Sequence: Synthetic polypeptide
MGSLQPLATLYLLGMLVASVLAAENLWVTVYYGVPVWKEAKTTLFCASDAKAYEKKVHNVWATHACVPTDPNPQEMVLKNVTENFNMWKNDMVDQMHEDVISLWDQSLKPCVKLTPLCVTLNCTDATASNATAINSSIIEGMKNCSFNITTELRDKREKKNALFYKLDIVQLDGNSSQYRLINCNTSVITQACPKVSFDPIPIHYCAPAGYAILKCNNKTFNGTGPCNNVSTVQCTHGIKPVVSTQLLLNGSLAEGEIIIRSENITNNAKTIIVHLNESVKIECTRPSNNTRTSIRIGPGQWFYATGQVIGDIREAHCNISESKWNETLQRVSKKLKEYFPHKNITFQPSSGGDLEITTHSFNCGGEFFYCNTSSLFNRTYMANSTETNSTRIITIRCRIKQIINMWQEVGRAMYAPPIAGNITCISNITGLLLTRDGGKNNTETFETFRPEGGNMKDNWRSELYKYKVVKIEPLGVAPTRCKRRVVGRRRRRRAVGIGAVFLGFLGAAGSTMGAASMTLTVQARNLLSGIVQQQSNLLRAPEAQQHLLKLTVWGIKQLQARVLAVERYLRDQQLLGIWGCSGKLICCTNVPWNSSWSNRNLSEIWDNMTWLQWDKEISNYTQIIYGLLEESQNQQEKNEQDLLALD

SEQ ID NO: 272 - protein, 647 aa, Artificial Sequence
  Description of Artificial Sequence: Synthetic polypeptide
MGSLQPLATLYLLGMLVASVLAAENLWVTVYYGVPVWKEAKTTLFCASDAKAYEKEVRNVWATHACVPTDPNPQEMVLKNVTENFNMWKNDMVDQMHEDVISLWDQSLKPCVKLTPLCVTLNCTDATASNATAINSSIIEGMKNCSFNITTELRDKREKKNALFYKLDIVQLDGNSSQYRLINCNTSVITQACPKVSFDPIPIHYCAPAGYAILKCNNKTFNGTGPCNNVSTVQCTHGIKPVVSTQLLLNGSLAEGEIIIRSENITNNAKTIIVHLNESVKIECTRPSNNTRTSIRIGPGQWFYATGQVIGDIREAHCNISESKWNETLQRVSKKLKEYFPHKNITFQPSSGGDLEITTHSFNCGGEFFYCNTSSLFNRTYMANSTETNSTRIITIRCRIKQIINMWQEVGRAMYAPPIAGNITCISNITGLLLTRDGGKNNTETFETFRPEGGNMKDNWRSELYKYKVVKIEPLGVAPTRCKRRVVGRRRRRRAVGIGAVFLGFLGAAGSTMGAASMTLTVQARNLLSGIVQQQSNLLRAPEAQQHLLKLTVWGIKQLQARVLAVERYLRDQQLLGIWGCSGKLICCTNVPWNSSWSNRNLSEIWDNMTWLQWDKEISNYTQIIYGLLEESQNQQEKNEQDLLALD

SEQ ID NO: 273 - protein, 24 aa, Artificial Sequence
  Description of Artificial Sequence: Synthetic peptide
MPMGSLQPLATLYLLGMLVASVLA

SEQ ID NO: 274 - protein, 647 aa, Artificial Sequence; identical to SEQ ID NO: 260
  Description of Artificial Sequence: Synthetic polypeptide

SEQ ID NO: 275 - protein, 846 aa, Artificial Sequence
  Description of Artificial Sequence: Synthetic polypeptide
MRVMGIQRNYPQWWIWSMLGFWMLMICNGMWVTVYYGVPVWKEAKTTLFCASDAKAYEKEVHNVWATHACVPTDPNPQEMVLKNVTENFNMWKNDMVDQMHEDVISLWDQSLKPCVKLTPLCVTLNCTNATASNSSIIEGMKNCSFNITTELRDKREKKNALFYKLDIVQLDGNSSQYRLINCNTSVITQACPKVSFDPIPIHYCAPAGYAILKCNNKTFTGTGPCNNVSTVQCTHGIKPVVSTQLLLNGSLAEGEIIIRSENITNNVKTIIVHLNESVKIECTRPNNKTRTSIRIGPGQAFYATGQVIGDIREAYCNINESKWNETLQRVSKKLKEYFPHKNITFQPSSGGDLEITTHSFNCGGEFFYCNTSSLFNRTYMANSTDMANSTETNSTRTITIHCRIKQIINMWQEVGRAMYAPPIAGNITCISNITGLLLTRDGGKNNTETFRPGGGNMKDNWRSELYKYKVVEVKPLGVAPTNARRRVVEREKRAVGMGAVFLGFLGAAGSTMGAASITLTVQARQLLSGIVQQQSNLLKAIEAQQHMLKLTVWGIKQLQARVLALERYLKDQQLLGMWGCSGKLICTTNVYWNSSWSNKTYGDIWDNMTWMQWEREISNYTEIIYELLEESQNQQEKNEQDLLALDRWNSLWNWFNITNWLWYIKIFIMIVGGLIGLRIIFAVLSLVNRVRQGYSPLSLQTLIPSPRGPDRPGGIEEEGGEQDRNRSTRLVSGFLALVWDDLRSLCLFIYHRLRDFILIAARAGELLGRSSLKGLRRGWEALKYLGSLVQYWGLELKRSAISLLDTLAIAVGEGTDRILEFVLGICRAIRNIPTRIRQGFETALL

SEQ ID NO: 276 - protein, 651 aa, Artificial Sequence
  Description of Artificial Sequence: Synthetic polypeptide
AENLWVTVYYGVPVWKDAETTLFCASDAKAYETEKHNVWATHACVPTDPNPQEIHLENVTEEFNMWKNNMVEQMHTDIISLWDQSLKPCVKLTPLCVTLQCTNVTNNITDDMRGELKNCSFNMTTELRDKKQKVYSLFYRLDVVQINENQGNRSNNSNKEYRLINCNTSAITQACPKVSFEPIPIHYCAPAGFAILKCKDKKFNGTGPCPSVSTVQCTHGIKPVVSTQLLLNGSLAEEEVMIRSENITNNAKNILVQFNTPVQINCTRPNNNTRKSIRIGPGQAFYATGDIIGDIRQAHCNVSKATWNETLGKVVKQLRKHFGNNTIIRFANSSGGDLEVTTHSFNCGGEFFYCNTSGLFNSTWISNTSVQGSNSTGSNDSITLPCRIKQIINMWQRIGQAMYAPPIQGVIRCVSNITGLILTRDGGSTNSTTETFRPGGGDMRDNWRSELYKYKVVKIEPLGVAPTRCKRRVVGRRRRRRAVGIGAVFLGFLGAAGSTMGAASMTLTVQARNLLSGIVQQQSNLLRAPEAQQHLLKLTVWGIKQLQARVLAVERYLRDQQLLGIWGCSGKLICCTNVPWNSSWSNRNLSEIWDNMTWLQWDKEISNYTQIIYGLLEESQNQQEKNEQDLLALDGSGLNDIFEAQKIEWHE

SEQ ID NO: 277 - DNA, 2550 bp, Artificial Sequence
  Description of Artificial Sequence: Synthetic polynucleotide
atgcccatgggcagcctgcagcccctggccaccctgtacctgctgggcatgctggtggctagcgtgctggccgccgagaacctgtgggtgaccgtctactatggcgtgcccgtctggaaggaagccaaaaccacactgttctgcgctagcgacgctaaggcatacgagaaaaaagtgcacaatgtctgggctactcatgcatgcgtgcctaccgatccaaatccccaggagatggtgctgaagaacgtcacagaaaactttaatatgtggaagaacgacatggtggatcagatgcacgaggacgtgatcagcctgtgggatcagtccctgaagccatgcgtgaaactgactcccctgtgcgtcaccctgaactgtactaatgccaccgcttccaacagctccatcattgaggggatgaagaactgttctttcaatatcactaccgagctgcgcgacaagcgagaaaagaaaaatgccctgttttacaaactggacatcgtgcagctggatggcaactctagtcagtatagactgattaactgcaatacaagcgtgatcactcaggcatgtccaaaggtcagtttcgatcctattccaatccactactgcgcacccgccggatatgctatcctgaagtgtaacaacaagaccttcaccggcactgggccttgcaacaacgtgagcaccgtccagtgtacacatggcattaagccagtggtcagcacccagctgctgctgaacggcagcctggcagagggcgaaatcattatccgcagcgagaacatcacaaataatgtgaagactatcatcgtccacctgaacgagagcgtgaagattgaatgcacacggcccaacaacaagaccaggacatccattcgcatcggacctggccagtggttctacgctactggccaggtcatcggggacatcagagaggcctattgtaacatcaatgagtcaaagtggaatgaaactctgcagagggtgagcaagaaactgaaggaatacttccctcacaaaaacatcacctttcagccatcaagcggcggggacctggagattacaactcattctttcaattgcggaggcgaattcttttactgtaacacctcctctctgtttaatcgcacatatatggctaacagtactgatatggcaaactctactgagaccaatagtacacgaactattaccatccattgccggatcaagcagattatcaacatgtggcaggaagtggggcgggccatgtatgctccccctattgcaggaaatattacctgtatcagcaacattaccggcctgctgctgacaagagacgggggaaagaacaatacagagacttttaggcctggcgggggaaacatgaaagataattggcgctccgagctgtacaagtataaagtggtcaagatcgaaccactgggagtggcacctacccgatgtaaacggagagtggtcggaaggcgccgacggagaagggcagtgggaatcggagccgtcttcctgggctttctgggagcagctggcagcacaatgggagcagcctctatgaccctgacagtgcaggctcgaaatctgctgagtgggatcgtgcagcagcagtcaaacctgctgcgagcaccagaggcacagcagcatctgctgaagctgaccgtgtggggcatcaagcagctgcaggccagagtgctggctgtcgaacggtacctgagagatcagcagctgctgggaatctggggatgcagcggaaagctgatttgctgtacaaacgtgccctggaatagttcatggtcaaacaggaatctgagcgagatctgggacaatatgacctggctgcagtgggataaggaaatcagtaactacacacagatcatctatggcctgctggaggaatcacagaaccagcaggagaaaaatgaacaggacctgctggccctggattgactaaagtgggcaagtctgtggaattggtttgacatatcaaactggctgtggtatataaaaatatttataatgatagtaggaggcttaataggattaagaatagtttttgctgtgctttctgtaatacatagagttaggcagggatactcacctttgtcgtttcagacccataccccaaacccaaggggactcgacaggcccgaaagaatcgaagaagaagatggagagcaagacagaggcagatcgacgcgattagtgagcggattcttagctcttgcctgggacgatctgaggagcctgtgcctcttctgctaccaccgattgagagacttcatcttgattgcagcgaggattgtggaacttctgggacacagcagtctcaaggggttgagactggggtgggaaggcctcaagtatctgtggaatctcctggcatattggggtcgggaactaaaaattagtgctattaatttgtttgataccatagcaatagcagtagctgagtggacagatagggttatagaaataggacaaagactttgtagagcttttctccacatacctagaagaatcagacagggcctcgaaagggctttgctataataa

SEQ ID NO: 278 - protein, 847 aa, Artificial Sequence
  Description of Artificial Sequence: Synthetic polypeptide
MPMGSLQPLATLYLLGMLVASVLAAENLWVTVYYGVPVWKEAKTTLFCASDAKAYEKKVHNVWATHACVPTDPNPQEMVLKNVTENFNMWKNDMVDQMHEDVISLWDQSLKPCVKLTPLCVTLNCTNATASNSSIIEGMKNCSFNITTELRDKREKKNALFYKLDIVQLDGNSSQYRLINCNTSVITQACPKVSFDPIPIHYCAPAGYAILKCNNKTFTGTGPCNNVSTVQCTHGIKPVVSTQLLLNGSLAEGEIIIRSENITNNVKTIIVHLNESVKIECTRPNNKTRTSIRIGPGQWFYATGQVIGDIREAYCNINESKWNETLQRVSKKLKEYFPHKNITFQPSSGGDLEITTHSFNCGGEFFYCNTSSLFNRTYMANSTDMANSTETNSTRTITIHCRIKQIINMWQEVGRAMYAPPIAGNITCISNITGLLLTRDGGKNNTETFRPGGGNMKDNWRSELYKYKVVKIEPLGVAPTRCKRRVVGRRRRRRAVGIGAVFLGFLGAAGSTMGAASMTLTVQARNLLSGIVQQQSNLLRAPEAQQHLLKLTVWGIKQLQARVLAVERYLRDQQLLGIWGCSGKLICCTNVPWNSSWSNRNLSEIWDNMTWLQWDKEISNYTQIIYGLLEESQNQQEKNEQDLLALDLKWASLWNWFDISNWLWYIKIFIMIVGGLIGLRIVFAVLSVIHRVRQGYSPLSFQTHTPNPRGLDRPERIEEEDGEQDRGRSTRLVSGFLALAWDDLRSLCLFCYHRLRDFILIAARIVELLGHSSLKGLRLGWEGLKYLWNLLAYWGRELKISAINLFDTIAIAVAEWTDRVIEIGQRLCRAFLHIPRRIRQGLERALL

SEQ ID NO: 279 - DNA, 2553 bp, Artificial Sequence
  Description of Artificial Sequence: Synthetic polynucleotide
atgcccatgggcagcctgcagcccctggccaccctgtacctgctgggcatgctggtggctagcgtgctggccgccgagaacctgtgggtgaccgtctactatggcgtgcccgtctggaaggaagccaaaaccacactgttctgcgctagcgacgctaaggcatacgagaaaaaagtgcacaatgtctgggctactcatgcatgcgtgcctaccgatccaaatccccaggagatggtgctgaagaacgtcacagaaaactttaatatgtggaagaacgacatggtggatcagatgcacgaggacgtgatcagcctgtgggatcagtccctgaagccatgcgtgaaactgactcccctgtgcgtcaccctgaactgtactaatgccaccgcttccaacagctccatcattgaggggatgaagaactgttctttcaatatcactaccgagctgcgcgacaagcgagaaaagaaaaatgccctgttttacaaactggacatcgtgcagctggatggcaactctagtcagtatagactgattaactgcaatacaagcgtgatcactcaggcatgtccaaaggtcagtttcgatcctattccaatccactactgcgcacccgccggatatgctatcctgaagtgtaacaacaagaccttcaccggcactgggccttgcaacaacgtgagcaccgtccagtgtacacatggcattaagccagtggtcagcacccagctgctgctgaacggcagcctggcagagggcgaaatcattatccgcagcgagaacatcacaaataatgtgaagactatcatcgtccacctgaacgagagcgtgaagattgaatgcacacggcccaacaacaagaccaggacatccattcgcatcggacctggccagtggttctacgctactggccaggtcatcggggacatcagagaggcctattgtaacatcaatgagtcaaagtggaatgaaactctgcagagggtgagcaagaaactgaaggaatacttccctcacaaaaacatcacctttcagccatcaagcggcggggacctggagattacaactcattctttcaattgcggaggcgaattcttttactgtaacacctcctctctgtttaatcgcacatatatggctaacagtactgatatggcaaactctactgagaccaatagtacacgaactattaccatccattgccggatcaagcagattatcaacatgtggcaggaagtggggcgggccatgtatgctccccctattgcaggaaatattacctgtatcagcaacattaccggcctgctgctgacaagagacgggggaaagaacaatacagagacttttaggcctggcgggggaaacatgaaagataattggcgctccgagctgtacaagtataaagtggtcaagatcgaaccactgggagtggcacctacccgatgtaaacggagagtggtcggaaggcgccgacggagaagggcagtgggaatcggagccgtcttcctgggctttctgggagcagctggcagcacaatgggagcagcctctatgaccctgacagtgcaggctcgaaatctgctgagtgggatcgtgcagcagcagtcaaacctgctgcgagcaccagaggcacagcagcatctgctgaagctgaccgtgtggggcatcaagcagctgcaggccagagtgctggctgtcgaacggtacctgagagatcagcagctgctgggaatctggggatgcagcggaaagctgatttgctgtacaaacgtgccctggaatagttcatggtcaaacaggaatctgagcgagatctgggacaatatgacctggctgcagtgggataaggaaatcagtaactacacacagatcatctatggcctgctggaggaatcacagaaccagcaggagaaaaatgaacaggacctgctggccctggattgactaggcaagtgggcaagtctgtggaattggtttgacatatcaaactggctgtggtatataaaaatatttataatgatagtaggaggcttaataggattaagaatagtttttgctgtgctttctgtaatacatagagttaggcagggatactcacctttgtcgtttcagacccataccccaaacccaaggggactcgacaggcccgaaagaatcgaagaagaagatggagagcaagacagaggcagatcgacgcgattagtgagcggattcttagctcttgcctgggacgatctgaggagcctgtgcctcttctgctaccaccgattgagagacttcatcttgattgcagcgaggattgtggaacttctgggacacagcagtctcaaggggttgagactggggtgggaaggcctcaagtatctgtggaatctcctggcatattggggtcgggaactaaaaattagtgctattaatttgtttgataccatagcaatagcagtagctgagtggacagatagggttatagaaataggacaaagactttgtagagcttttctccacatacctagaagaatcagacagggcctcgaaagggctttgctataataa

SEQ ID NO: 280 - protein, 848 aa, Artificial Sequence
  Description of Artificial Sequence: Synthetic polypeptide
MPMGSLQPLATLYLLGMLVASVLAAENLWVTVYYGVPVWKEAKTTLFCASDAKAYEKKVHNVWATHACVPTDPNPQEMVLKNVTENFNMWKNDMVDQMHEDVISLWDQSLKPCVKLTPLCVTLNCTNATASNSSIIEGMKNCSFNITTELRDKREKKNALFYKLDIVQLDGNSSQYRLINCNTSVITQACPKVSFDPIPIHYCAPAGYAILKCNNKTFTGTGPCNNVSTVQCTHGIKPVVSTQLLLNGSLAEGEIIIRSENITNNVKTIIVHLNESVKIECTRPNNKTRTSIRIGPGQWFYATGQVIGDIREAYCNINESKWNETLQRVSKKLKEYFPHKNITFQPSSGGDLEITTHSFNCGGEFFYCNTSSLFNRTYMANSTDMANSTETNSTRTITIHCRIKQIINMWQEVGRAMYAPPIAGNITCISNITGLLLTRDGGKNNTETFRPGGGNMKDNWRSELYKYKVVKIEPLGVAPTRCKRRVVGRRRRRRAVGIGAVFLGFLGAAGSTMGAASMTLTVQARNLLSGIVQQQSNLLRAPEAQQHLLKLTVWGIKQLQARVLAVERYLRDQQLLGIWGCSGKLICCTNVPWNSSWSNRNLSEIWDNMTWLQWDKEISNYTQIIYGLLEESQNQQEKNEQDLLALDLGKWASLWNWFDISNWLWYIKIFIMIVGGLIGLRIVFAVLSVIHRVRQGYSPLSFQTHTPNPRGLDRPERIEEEDGEQDRGRSTRLVSGFLALAWDDLRSLCLFCYHRLRDFILIAARIVELLGHSSLKGLRLGWEGLKYLWNLLAYWGRELKISAINLFDTIAIAVAEWTDRVIEIGQRLCRAFLHIPRRIRQGLERALL

SEQ ID NO: 281 - DNA, 2550 bp, Artificial Sequence
  Description of Artificial Sequence: Synthetic polynucleotide
atgcccatgggctccctgcagcccctggccaccctgtacctgctgggcatgctggtggcctccgtgctggccgccgagaacctgtgggtgaccgtgtactacggcgtgcccgtgtggaaggaggccaagaccaccctgttctgcgcctccgacgccaaggcctacgagaagaaggtgcacaacgtgtgggccacccacgcctgcgtgcccaccgaccccaacccccaggagatggtgctgaagaacgtgaccgagaacttcaacatgtggaagaacgacatggtggaccagatgcacgaggacgtgatctccctgtgggaccagtccctgaagccctgcgtgaagctgacccccctgtgcgtgaccctgaactgcaccaacgccaccgcctccaactcctccatcatcgagggcatgaagaactgctccttcaacatcaccaccgagctgcgcgacaagcgcgagaagaagaacgccctgttctacaagctggacatcgtgcagctggacggcaactcctcccagtaccgcctgatcaactgcaacacctccgtgatcacccaggcctgccccaaggtgtccttcgaccccatccccatccactactgcgcccccgccggctacgccatcctgaagtgcaacaacaagaccttcaccggcaccggcccctgcaacaacgtgtccaccgtgcagtgcacccacggcatcaagcccgtggtgtccacccagctgctgctgaacggctccctggccgagggcgagatcatcatccgctccgagaacatcaccaagaacgtgaagaccatcatcgtgcacctgaacgagtccgtgaagatcgagtgcacccgccccaacaacaagacccgcacctccatccgcatcggccccggccagtggttctacgccaccggccaggtgatcggcgacatccgcgaggcctactgcaacatcaacgagtccaagtggaacgagaccctgcagcgcgtgtccaagaagctgaaggagtacttcccccacaagaacatcaccttccagccctcctccggcggcgacctggagatcaccacccactccttcaactgcggcggcgagttcttctactgcaacacctcctccctgttcaaccgcacctacatggccaactccaccgacatggccaactccaccgagaccaactccacccgcaccatcaccatccactgccgcatcaagcagatcatcaacatgtggcaggaggtgggccgcgccatgtacgccccccccatcgccggcaacatcacctgcatctccaacatcaccggcctgctgctgacccgcgacggcggcaagaacaacaccgagaccttccgccccggcggcggcaacatgaaggacaactggcgctccgagctgtacaagtacaaggtggtgaagatcgagcccctgggcgtggcccccacccgctgcaagcgccgcgtggtgggccgccgccgccgccgccgcgccgtgggcatcggcgccgtgttcctgggcttcctgggcgccgccggctccaccatgggcgccgcctccatgaccctgaccgtgcaggcccgcaacctgctgtccggcatcgtgcagcagcagtccaacctgctgcgcgcccccgaggcccagcagcacctgctgaagctgaccgtgtggggcatcaagcagctgcaggcccgcgtgctggccgtggagcgctacctgcgcgaccagcagctgctgggcatctggggctgctccggcaagctgatctgctgcaccaacgtgccctggaactcctcctggtccaaccgcaacctgtccgagatctgggacaacatgacctggctgcagtgggacaaggagatctccaactacacccagatcatctacggcctgctggaggagtcccagaaccagcaggagaagaacgagcaggacctgctggccctggattgactaaagtgggcaagtctgtggaattggtttgacatatcaaactggctgtggtatataaaaatatttataatgatagtaggaggcttaataggattaagaatagtttttgctgtgctttctgtaatacatagagttaggcagggatactcacctttgtcgtttcagacccataccccaaacccaaggggactcgacaggcccgaaagaatcgaagaagaagatggagagcaagacagaggcagatcgacgcgattagtgagcggattcttagctcttgcctgggacgatctgaggagcctgtgcctcttctgctaccaccgattgagagacttcatcttgattgcagcgaggattgtggaacttctgggacacagcagtctcaaggggttgagactggggtgggaaggcctcaagtatctgtggaatctcctggcatattggggtcgggaactaaaaattagtgctattaatttgtttgataccatagcaatagcagtagctgagtggacagatagggttatagaaataggacaaagactttgtagagcttttctccacatacctagaagaatcagacagggcctcgaaagggctttgctataataa

SEQ ID NO: 282 - protein, 847 aa, Artificial Sequence
  Description of Artificial Sequence: Synthetic polypeptide
MPMGSLQPLATLYLLGMLVASVLAAENLWVTVYYGVPVWKEAKTTLFCASDAKAYEKKVHNVWATHACVPTDPNPQEMVLKNVTENFNMWKNDMVDQMHEDVISLWDQSLKPCVKLTPLCVTLNCTNATASNSSIIEGMKNCSFNITTELRDKREKKNALFYKLDIVQLDGNSSQYRLINCNTSVITQACPKVSFDPIPIHYCAPAGYAILKCNNKTFTGTGPCNNVSTVQCTHGIKPVVSTQLLLNGSLAEGEIIIRSENITKNVKTIIVHLNESVKIECTRPNNKTRTSIRIGPGQWFYATGQVIGDIREAYCNINESKWNETLQRVSKKLKEYFPHKNITFQPSSGGDLEITTHSFNCGGEFFYCNTSSLFNRTYMANSTDMANSTETNSTRTITIHCRIKQIINMWQEVGRAMYAPPIAGNITCISNITGLLLTRDGGKNNTETFRPGGGNMKDNWRSELYKYKVVKIEPLGVAPTRCKRRVVGRRRRRRAVGIGAVFLGFLGAAGSTMGAASMTLTVQARNLLSGIVQQQSNLLRAPEAQQHLLKLTVWGIKQLQARVLAVERYLRDQQLLGIWGCSGKLICCTNVPWNSSWSNRNLSEIWDNMTWLQWDKEISNYTQIIYGLLEESQNQQEKNEQDLLALDLKWASLWNWFDISNWLWYIKIFIMIVGGLIGLRIVFAVLSVIHRVRQGYSPLSFQTHTPNPRGLDRPERIEEEDGEQDRGRSTRLVSGFLALAWDDLRSLCLFCYHRLRDFILIAARIVELLGHSSLKGLRLGWEGLKYLWNLLAYWGRELKISAINLFDTIAIAVAEWTDRVIEIGQRLCRAFLHIPRRIRQGLERALL

SEQ ID NO: 283 - DNA, 2553 bp, Artificial Sequence
  Description of Artificial Sequence: Synthetic polynucleotide
atgcccatgggctccctgcagcccctggccaccctgtacctgctgggcatgctggtggcctccgtgctggccgccgagaacctgtgggtgaccgtgtactacggcgtgcccgtgtggaaggaggccaagaccaccctgttctgcgcctccgacgccaaggcctacgagaagaaggtgcacaacgtgtgggccacccacgcctgcgtgcccaccgaccccaacccccaggagatggtgctgaagaacgtgaccgagaacttcaacatgtggaagaacgacatggtggaccagatgcacgaggacgtgatctccctgtgggaccagtccctgaagccctgcgtgaagctgacccccctgtgcgtgaccctgaactgcaccaacgccaccgcctccaactcctccatcatcgagggcatgaagaactgctccttcaacatcaccaccgagctgcgcgacaagcgcgagaagaagaacgccctgttctacaagctggacatcgtgcagctggacggcaactcctcccagtaccgcctgatcaactgcaacacctccgtgatcacccaggcctgccccaaggtgtccttcgaccccatccccatccactactgcgcccccgccggctacgccatcctgaagtgcaacaacaagaccttcaccggcaccggcccctgcaacaacgtgtccaccgtgcagtgcacccacggcatcaagcccgtggtgtccacccagctgctgctgaacggctccctggccgagggcgagatcatcatccgctccgagaacatcaccaagaacgtgaagaccatcatcgtgcacctgaacgagtccgtgaagatcgagtgcacccgccccaacaacaagacccgcacctccatccgcatcggccccggccagtggttctacgccaccggccaggtgatcggcgacatccgcgaggcctactgcaacatcaacgagtccaagtggaacgagaccctgcagcgcgtgtccaagaagctgaaggagtacttcccccacaagaacatcaccttccagccctcctccggcggcgacctggagatcaccacccactccttcaactgcggcggcgagttcttctactgcaacacctcctccctgttcaaccgcacctacatggccaactccaccgacatggccaactccaccgagaccaactccacccgcaccatcaccatccactgccgcatcaagcagatcatcaacatgtggcaggaggtgggccgcgccatgtacgccccccccatcgccggcaacatcacctgcatctccaacatcaccggcctgctgctgacccgcgacggcggcaagaacaacaccgagaccttccgccccggcggcggcaacatgaaggacaactggcgctccgagctgtacaagtacaaggtggtgaagatcgagcccctgggcgtggcccccacccgctgcaagcgccgcgtggtgggccgccgccgccgccgccgcgccgtgggcatcggcgccgtgttcctgggcttcctgggcgccgccggctccaccatgggcgccgcctccatgaccctgaccgtgcaggcccgcaacctgctgtccggcatcgtgcagcagcagtccaacctgctgcgcgcccccgaggcccagcagcacctgctgaagctgaccgtgtggggcatcaagcagctgcaggcccgcgtgctggccgtggagcgctacctgcgcgaccagcagctgctgggcatctggggctgctccggcaagctgatctgctgcaccaacgtgccctggaactcctcctggtccaaccgcaacctgtccgagatctgggacaacatgacctggctgcagtgggacaaggagatctccaactacacccagatcatctacggcctgctggaggagtcccagaaccagcaggagaagaacgagcaggacctgctggccctggattgactaggcaagtgggcaagtctgtggaattggtttgacatatcaaactggctgtggtatataaaaatatttataatgatagtaggaggcttaataggattaagaatagtttttgctgtgctttctgtaatacatagagttaggcagggatactcacctttgtcgtttcagacccataccccaaacccaaggggactcgacaggcccgaaagaatcgaagaagaagatggagagcaagacagaggcagatcgacgcgattagtgagcggattcttagctcttgcctgggacgatctgaggagcctgtgcctcttctgctaccaccgattgagagacttcatcttgattgcagcgaggattgtggaacttctgggacacagcagtctcaaggggttgagactggggtgggaaggcctcaagtatctgtggaatctcctggcatattggggtcgggaactaaaaattagtgctattaatttgtttgataccatagcaatagcagtagctgagtggacagatagggttatagaaataggacaaagactttgtagagcttttctccacatacctagaagaatcagacagggcctcgaaagggctttgctataataa

SEQ ID NO: 284 - protein, 848 aa, Artificial Sequence
  Description of Artificial Sequence: Synthetic polypeptide
MPMGSLQPLATLYLLGMLVASVLAAENLWVTVYYGVPVWKEAKTTLFCASDAKAYEKKVHNVWATHACVPTDPNPQEMVLKNVTENFNMWKNDMVDQMHEDVISLWDQSLKPCVKLTPLCVTLNCTNATASNSSIIEGMKNCSFNITTELRDKREKKNALFYKLDIVQLDGNSSQYRLINCNTSVITQACPKVSFDPIPIHYCAPAGYAILKCNNKTFTGTGPCNNVSTVQCTHGIKPVVSTQLLLNGSLAEGEIIIRSENITKNVKTIIVHLNESVKIECTRPNNKTRTSIRIGPGQWFYATGQVIGDIREAYCNINESKWNETLQRVSKKLKEYFPHKNITFQPSSGGDLEITTHSFNCGGEFFYCNTSSLFNRTYMANSTDMANSTETNSTRTITIHCRIKQIINMWQEVGRAMYAPPIAGNITCISNITGLLLTRDGGKNNTETFRPGGGNMKDNWRSELYKYKVVKIEPLGVAPTRCKRRVVGRRRRRRAVGIGAVFLGFLGAAGSTMGAASMTLTVQARNLLSGIVQQQSNLLRAPEAQQHLLKLTVWGIKQLQARVLAVERYLRDQQLLGIWGCSGKLICCTNVPWNSSWSNRNLSEIWDNMTWLQWDKEISNYTQIIYGLLEESQNQQEKNEQDLLALDLGKWASLWNWFDISNWLWYIKIFIMIVGGLIGLRIVFAVLSVIHRVRQGYSPLSFQTHTPNPRGLDRPERIEEEDGEQDRGRSTRLVSGFLALAWDDLRSLCLFCYHRLRDFILIAARIVELLGHSSLKGLRLGWEGLKYLWNLLAYWGRELKISAINLFDTIAIAVAEWTDRVIEIGQRLCRAFLHIPRRIRQGLERALL

SEQ ID NO: 285 - protein, 847 aa, Artificial Sequence; identical to SEQ ID NO: 282
  Description of Artificial Sequence: Synthetic polypeptide

SEQ ID NO: 286 - protein, 847 aa, Artificial Sequence; identical to SEQ ID NO: 278
  Description of Artificial Sequence: Synthetic polypeptide

SEQ ID NO: 287 - protein, 848 aa, Artificial Sequence; identical to SEQ ID NO: 284
  Description of Artificial Sequence: Synthetic polypeptide

SEQ ID NO: 288 - protein, 848 aa, Artificial Sequence; identical to SEQ ID NO: 280
  Description of Artificial Sequence: Synthetic polypeptide

SEQ ID NO: 289 - DNA, 2583 bp, Artificial Sequence
  Description of Artificial Sequence: Synthetic polynucleotide
atgagagtgatggggatacagaggaattgtcagcacttattcagatggggaactatgatcttggggatgataataatctgtagtgcagcagaaaacttgtgggtcactgtctactatggggtacctgtgtggaaagacgcagagaccaccttattttgtgcatcagatgctaaagcatatgagacagaaaagcataatgtctgggctacacatgcctgtgtacccacagaccccaacccacaagaaatacatttggaaaatgtgactgaagagtttaacatgtggaaaaataacatggtagagcagatgcatacagatatcatcagtctatgggaccaaagcctaaagccatgtgtaaagttaacccctctctgcgttactctacagtgtaccaatgtcaccaataatatcactgatgacatgaggggagaattaaaaaactgctctttcaatatgaccacagagctaagggataagaaacagaaggtttattcacttttttatagactagatgtagtacaaattaacgagaatcaaggtaataggagtaataatagtaacaaggagtatagattaataaattgtaatacctcagccattacacaggcttgtccaaaggtatcctttgagccaattcccatacattattgtgccccagctggttttgcgatcctaaagtgtaaggataagaagttcaatggaacagggccatgcccaagtgtcagcacagtacaatgcacacatggaatcaagccagtagtatcaactcaactgctgttaaatggcagtctagcagaagaagaggtaatgattagatctgaaaatatcacaaacaatgccaaaaacatactagtacaatttaacacgcctgtgcaaattaattgtaccagacctaacaacaatacaaggaaaagtatacgtataggaccaggacaagcattctatgcaacaggggacataataggggatataagacaagcacattgtactgtcagtaaagcaacatggaatgaaactttgggaaaggtggtcaaacaattaagaaaacactttgggaacaacacaataataagatttgctaattcctcaggaggggatctagaagtcacaacacatagttttaattgtggaggagaatttttctattgtaacacatcaggcctgttcaatagcacttggattagcaataccagcgtgcaggggtcaaatagcacggggtcaaatgacagtataactctcccatgcagaataaagcaaattataaatatgtggcagagaataggacaagcaatgtatgcccctcccatccaaggagtaataagatgtgtatcaaacattacagggctaatattaacaagagatggtgggagtactaatagtacaactgaaaccttcagacctggaggaggagatatgagggacaattggagaagtgaattatataagtataaagtagtaaaaattgaaccactaggagtagcacccaccagggcaaagagaagagtggtggggagagaaaaaagagcagttggaataggagctgtcttccttgggttcttaggagcagcaggaagcactatgggcgcggcgtcaatgacgctgacggtacaggccagaaatttattatctggcatagtgcaacagcaaagcaatttgctgagggctatagaggctcaacaacatctgttgaaactcacggtctggggcattaaacagctccaggcaagggtcctggctgtggaaagatacctaagggatcaacagcttctaggaatttggggctgctctggaaaactcatctgcaccactaatgtgccctggaactctagttggagtaatagaaacctgagtgagatatgggacaacatgacctggctgcaatgggataaagaaattagcaattacacacagataatatatgggctacttgaagaatcgcagaaccagcaggaaaagaatgaacaagacttattggcattggataagtgggcaagtctgtggaattggtttgacatatcaaactggctgtggtatataaaaatatttataatgatagtaggaggcttaataggattaagaatagtttttgctgtgctttctgtaatacatagagttaggcagggatactcacctttgtcgtttcagacccataccccaaacccaaggggactcgacaggcccgaaagaatcgaagaagaagatggagagcaagacagaggcagatcgacgcgattagtgagcggattcttagctcttgcctgggacgatctgaggagcctgtgcctcttctgctaccaccgattgagagacttcatcttgattgcagcgaggattgtggaacttctgggacacagcagtctcaaggggttgagactggggtgggaaggcctcaagtatctgtggaatctcctggcatattggggtcgggaactaaaaattagtgctattaatttgtttgataccatagcaatagcagtagctgagtggacagatagggttatagaaataggacaaagactttgtagagcttttctccacatacctagaagaatcagacagggcctcgaaagggctttgctataa

SEQ ID NO: 290 - protein, 860 aa, Artificial Sequence
  Description of Artificial Sequence: Synthetic polypeptide
MRVMGIQRNCQHLFRWGTMILGMIIICSAAENLWVTVYYGVPVWKDAETTLFCASDAKAYETEKHNVWATHACVPTDPNPQEIHLENVTEEFNMWKNNMVEQMHTDIISLWDQSLKPCVKLTPLCVTLQCTNVTNNITDDMRGELKNCSFNMTTELRDKKQKVYSLFYRLDVVQINENQGNRSNNSNKEYRLINCNTSAITQACPKVSFEPIPIHYCAPAGFAILKCKDKKFNGTGPCPSVSTVQCTHGIKPVVSTQLLLNGSLAEEEVMIRSENITNNAKNILVQFNTPVQINCTRPNNNTRKSIRIGPGQAFYATGDIIGDIRQAHCTVSKATWNETLGKVVKQLRKHFGNNTIIRFANSSGGDLEVTTHSFNCGGEFFYCNTSGLFNSTWISNTSVQGSNSTGSNDSITLPCRIKQIINMWQRIGQAMYAPPIQGVIRCVSNITGLILTRDGGSTNSTTETFRPGGGDMRDNWRSELYKYKVVKIEPLGVAPTRAKRRVVGREKRAVGIGAVFLGFLGAAGSTMGAASMTLTVQARNLLSGIVQQQSNLLRAIEAQQHLLKLTVWGIKQLQARVLAVERYLRDQQLLGIWGCSGKLICTTNVPWNSSWSNRNLSEIWDNMTWLQWDKEISNYTQIIYGLLEESQNQQEKNEQDLLALDKWASLWNWFDISNWLWYIKIFIMIVGGLIGLRIVFAVLSVIHRVRQGYSPLSFQTHTPNPRGLDRPERIEEEDGEQDRGRSTRLVSGFLALAWDDLRSLCLFCYHRLRDFILIAARIVELLGHSSLKGLRLGWEGLKYLWNLLAYWGRELKISAINLFDTIAIAVAEWTDRVIEIGQRLCRAFLHIPRRIRQGLERALL

SEQ ID NO: 291 - DNA, 2570 bp, Artificial Sequence
  Description of Artificial Sequence: Synthetic polynucleotide
tctagaccaccatgcccatgggcagcctgcagcccctggccaccctgtacctgctgggcatgctggtggctagcgtgctggccgccgagaacctgtgggtgaccgtctactatggcgtgcccgtctggaaggaagccaaaaccacactgttctgcgctagcgacgctaaggcatacgagaaaaaagtgcacaatgtctgggctactcatgcatgcgtgcctaccgatccaaatccccaggagatggtgctgaagaacgtcacagaaaactttaatatgtggaagaacgacatggtggatcagatgcacgaggacgtgatcagcctgtgggatcagtccctgaagccatgcgtgaaactgactcccctgtgcgtcaccctgaactgtactaatgccaccgcttccaacagctccatcattgaggggatgaagaactgttctttcaatatcactaccgagctgcgcgacaagcgagaaaagaaaaatgccctgttttacaaactggacatcgtgcagctggatggcaactctagtcagtatagactgattaactgcaatacaagcgtgatcactcaggcatgtccaaaggtcagtttcgatcctattccaatccactactgcgcacccgccggatatgctatcctgaagtgtaacaacaagaccttcaccggcactgggccttgcaacaacgtgagcaccgtccagtgtacacatggcattaagccagtggtcagcacccagctgctgctgaacggcagcctggcagagggcgaaatcattatccgcagcgagaacatcacaaataatgtgaagactatcatcgtccacctgaacgagagcgtgaagattgaatgcacacggcccaacaacaagaccaggacatccattcgcatcggacctggccagtggttctacgctactggccaggtcatcggggacatcagagaggcctattgtaacatcaatgagtcaaagtggaatgaaactctgcagagggtgagcaagaaactgaaggaatacttccctcacaaaaacatcacctttcagccatcaagcggcggggacctggagattacaactcattctttcaattgcggaggcgaattcttttactgtaacacctcctctctgtttaatcgcacatatatggctaacagtactgatatggcaaactctactgagaccaatagtacacgaactattaccatccattgccggatcaagcagattatcaacatgtggcaggaagtggggcgggccatgtatgctccccctattgcaggaaatattacctgtatcagcaacattaccggcctgctgctgacaagagacgggggaaagaacaatacagagacttttaggcctggcgggggaaacatgaaagataattggcgctccgagctgtacaagtataaagtggtcaagatcgaaccactgggagtggcacctacccgatgtaaacggagagtggtcggaaggcgccgacggagaagggcagtgggaatcggagccgtcttcctgggctttctgggagcagctggcagcacaatgggagcagcctctatgaccctgacagtgcaggctcgaaatctgctgagtgggatcgtgcagcagcagtcaaacctgctgcgagcaccagaggcacagcagcatctgctgaagctgaccgtgtggggcatcaagcagctgcaggccagagtgctggctgtcgaacggtacctgagagatcagcagctgctgggaatctggggatgcagcggaaagctgatttgctgtacaaacgtgccctggaatagttcatggtcaaacaggaatctgagcgagatctgggacaatatgacctggctgcagtgggataaggaaatcagtaactacacacagatcatctatggcctgctggaggaatcacagaaccagcaggagaaaaatgaacaggacctgctggccctggattgactaggcaagtgggcaagtctgtggaattggtttgacatatcaaactggctgtggtatataaaaatatttataatgatagtaggaggcttaataggattaagaatagtttttgctgtgctttctgtaatacatagagttaggcagggatactcacctttgtcgtttcagacccataccccaaacccaaggggactcgacaggcccgaaagaatcgaagaagaagatggagagcaagacagaggcagatcgacgcgattagtgagcggattcttagctcttgcctgggacgatctgaggagcctgtgcctcttctgctaccaccgattgagagacttcatcttgattgcagcgaggattgtggaacttctgggacacagcagtctcaaggggttgagactggggtgggaaggcctcaagtatctgtggaatctcctggcatattggggtcgggaactaaaaattagtgctattaatttgtttgataccatagcaatagcagtagctgagtggacagatagggttatagaaataggacaaagactttgtagagcttttctccacatacctagaagaatcagacagggcctcgaaagggctttgctataataaggatcc

SEQ ID NO: 292 - protein, 848 aa, Artificial Sequence; identical to SEQ ID NO: 280
  Description of Artificial Sequence: Synthetic polypeptide

SEQ ID NO: 293 - DNA, 2567 bp, Artificial Sequence
  Description of Artificial Sequence: Synthetic polynucleotide
tctagaccaccatgcccatgggcagcctgcagcccctggccaccctgtacctgctgggcatgctggtggctagcgtgctggccgccgagaacctgtgggtgaccgtctactatggcgtgcccgtctggaaggaagccaaaaccacactgttctgcgctagcgacgctaaggcatacgagaaaaaagtgcacaatgtctgggctactcatgcatgcgtgcctaccgatccaaatccccaggagatggtgctgaagaacgtcacagaaaactttaatatgtggaagaacgacatggtggatcagatgcacgaggacgtgatcagcctgtgggatcagtccctgaagccatgcgtgaaactgactcccctgtgcgtcaccctgaactgtactaatgccaccgcttccaacagctccatcattgaggggatgaagaactgttctttcaatatcactaccgagctgcgcgacaagcgagaaaagaaaaatgccctgttttacaaactggacatcgtgcagctggatggcaactctagtcagtatagactgattaactgcaatacaagcgtgatcactcaggcatgtccaaaggtcagtttcgatcctattccaatccactactgcgcacccgccggatatgctatcctgaagtgtaacaacaagaccttcaccggcactgggccttgcaacaacgtgagcaccgtccagtgtacacatggcattaagccagtggtcagcacccagctgctgctgaacggcagcctggcagagggcgaaatcattatccgcagcgagaacatcacaaataatgtgaagactatcatcgtccacctgaacgagagcgtgaagattgaatgcacacggcccaacaacaagaccaggacatccattcgcatcggacctggccagtggttctacgctactggccaggtcatcggggacatcagagaggcctattgtaacatcaatgagtcaaagtggaatgaaactctgcagagggtgagcaagaaactgaaggaatacttccctcacaaaaacatcacctttcagccatcaagcggcggggacctggagattacaactcattctttcaattgcggaggcgaattcttttactgtaacacctcctctctgtttaatcgcacatatatggctaacagtactgatatggcaaactctactgagaccaatagtacacgaactattaccatccattgccggatcaagcagattatcaacatgtggcaggaagtggggcgggccatgtatgctccccctattgcaggaaatattacctgtatcagcaacattaccggcctgctgctgacaagagacgggggaaagaacaatacagagacttttaggcctggcgggggaaacatgaaagataattggcgctccgagctgtacaagtataaagtggtcaagatcgaaccactgggagtggcacctacccgatgtaaacggagagtggtcggaaggcgccgacggagaagggcagtgggaatcggagccgtcttcctgggctttctgggagcagctggcagcacaatgggagcagcctctatgaccctgacagtgcaggctcgaaatctgctgagtgggatcgtgcagcagcagtcaaacctgctgcgagcaccagaggcacagcagcatctgctgaagctgaccgtgtggggcatcaagcagctgcaggccagagtgctggctgtcgaacggtacctgagagatcagcagctgctgggaatctggggatgcagcggaaagctgatttgctgtacaaacgtgccctggaatagttcatggtcaaacaggaatctgagcgagatctgggacaatatgacctggctgcagtgggataaggaaatcagtaactacacacagatcatctatggcctgctggaggaatcacagaaccagcaggagaaaaatgaacaggacctgctggccctggattgactaaagtgggcaagtctgtggaattggtttgacatatcaaactggctgtggtatataaaaatatttataatgatagtaggaggcttaataggattaagaatagtttttgctgtgctttctgtaatacatagagttaggcagggatactcacctttgtcgtttcagacccataccccaaacccaaggggactcgacaggcccgaaagaatcgaagaagaagatggagagcaagacagaggcagatcgacgcgattagtgagcggattcttagctcttgcctgggacgatctgaggagcctgtgcctcttctgctaccaccgattgagagacttcatcttgattgcagcgaggattgtggaacttctgggacacagcagtctcaaggggttgagactggggtgggaaggcctcaagtatctgtggaatctcctggcatattggggtcgggaactaaaaattagtgctattaatttgtttgataccatagcaatagcagtagctgagtggacagatagggttatagaaataggacaaagactttgtagagcttttctccacatacctagaagaatcagacagggcctcgaaagggctttgctataataaggatcc

SEQ ID NO: 294 - protein, 847 aa, Artificial Sequence; identical to SEQ ID NO: 278
  Description of Artificial Sequence: Synthetic polypeptide

SEQ ID NO: 295 - protein, 848 aa, Artificial Sequence; identical to SEQ ID NO: 280
  Description of Artificial Sequence: Synthetic polypeptide

SEQ ID NO: 296 - protein, 847 aa, Artificial Sequence; identical to SEQ ID NO: 278
  Description of Artificial Sequence: Synthetic polypeptide

SEQ ID NO: 297 - DNA, 1962 bp, Artificial Sequence
  Description of Artificial Sequence: Synthetic polynucleotide
atgcccatgggcagcctgcagcccctggccaccctgtacctgctgggcatgctggtggctagcgtgctggccgccgagaacctgtgggtgaccgtctactatggcgtgcccgtctggaaggaagccaaaaccacactgttctgcgctagcgacgctaaggcatacgagaaaaaagtgcacaatgtctgggctactcatgcatgcgtgcctaccgatccaaatccccaggagatggtgctgaagaacgtcacagaaaactttaatatgtggaagaacgacatggtggatcagatgcacgaggacgtgatcagcctgtgggatcagtccctgaagccatgcgtgaaactgactcccctgtgcgtcaccctgaactgtactaatgccaccgcttccaacagctccatcattgaggggatgaagaactgttctttcaatatcactaccgagctgcgcgacaagcgagaaaagaaaaatgccctgttttacaaactggacatcgtgcagctggatggcaactctagtcagtatagactgattaactgcaatacaagcgtgatcactcaggcatgtccaaaggtcagtttcgatcctattccaatccactactgcgcacccgccggatatgctatcctgaagtgtaacaacaagaccttcaccggcactgggccttgcaacaacgtgagcaccgtccagtgtacacatggcattaagccagtggtcagcacccagctgctgctgaacggcagcctggcagagggcgaaatcattatccgcagcgagaacatcacaaataatgtgaagactatcatcgtccacctgaacgagagcgtgaagattgaatgcacacggcccaacaacaagaccaggacatccattcgcatcggacctggccagtggttctacgctactggccaggtcatcggggacatcagagaggcctattgtaacatcaatgagtcaaagtggaatgaaactctgcagagggtgagcaagaaactgaaggaatacttccctcacaaaaacatcacctttcagccatcaagcggcggggacctggagattacaactcattctttcaattgcggaggcgaattcttttactgtaacacctcctctctgtttaatcgcacatatatggctaacagtactgatatggcaaactctactgagaccaatagtacacgaactattaccatccattgccggatcaagcagattatcaacatgtggcaggaagtggggcgggccatgtatgctccccctattgcaggaaatattacctgtatcagcaacattaccggcctgctgctgacaagagacgggggaaagaacaatacagagacttttaggcctggcgggggaaacatgaaagataattggcgctccgagctgtacaagtataaagtggtcaagatcgaaccactgggagtggcacctacccgatgtaaacggagagtggtcggaaggcgccgacggagaagggcagtgggaatcggagccgtcttcctgggctttctgggagcagctggcagcacaatgggagcagcctctatgaccctgacagtgcaggctcgaaatctgctgagtgggatcgtgcagcagcagtcaaacctgctgcgagcaccagaggcacagcagcatctgctgaagctgaccgtgtggggcatcaagcagctgcaggccagagtgctggctgtcgaacggtacctgagagatcagcagctgctgggaatctggggatgcagcggaaagctgatttgctgtacaaacgtgccctggaatagttcatggtcaaacaggaatctgagcgagatctgggacaatatgacctggctgcagtgggataaggaaatcagtaactacacacagatcatctatggcctgctggaggaatcacagaaccagcaggagaaaaatgaacaggacctgctggccctggatctgcctagcaccggatgatga

SEQ ID NO: 298 - DNA, 1992 bp, Artificial Sequence
  Description of Artificial Sequence: Synthetic polynucleotide
atgcccatgggcagcctgcagcccctggccaccctgtacctgctgggcatgctggtggctagcgtgctggccggcgggggcgggggcggcgggggcgggggcggcgggggcgggggcgccgagaacctgtgggtgaccgtctactatggcgtgcccgtctggaaggaagccaaaaccacactgttctgcgctagcgacgctaaggcatacgagaaaaaagtgcacaatgtctgggctactcatgcatgcgtgcctaccgatccaaatccccaggagatggtgctgaagaacgtcacagaaaactttaatatgtggaagaacgacatggtggatcagatgcacgaggacgtgatcagcctgtgggatcagtccctgaagccatgcgtgaaactgactcccctgtgcgtcaccctgaactgtactaatgccaccgcttccaacagctccatcattgaggggatgaagaactgttctttcaatatcactaccgagctgcgcgacaagcgagaaaagaaaaatgccctgttttacaaactggacatcgtgcagctggatggcaactctagtcagtatagactgattaactgcaatacaagcgtgatcactcaggcatgtccaaaggtcagtttcgatcctattccaatccactactgcgcacccgccggatatgctatcctgaagtgtaacaacaagaccttcaccggcactgggccttgcaacaacgtgagcaccgtccagtgtacacatggcattaagccagtggtcagcacccagctgctgctgaacggcagcctggcagagggcgaaatcattatccgcagcgagaacatcacaaataatgtgaagactatcatcgtccacctgaacgagagcgtgaagattgaatgcacacggcccaacaacaagaccaggacatccattcgcatcggacctggccagtggttctacgctactggccaggtcatcggggacatcagagaggcctattgtaacatcaatgagtcaaagtggaatgaaactctgcagagggtgagcaagaaactgaaggaatacttccctcacaaaaacatcacctttcagccatcaagcggcggggacctggagattacaactcattctttcaattgcggaggcgaattcttttactgtaacacctcctctctgtttaatcgcacatatatggctaacagtactgatatggcaaactctactgagaccaatagtacacgaactattaccatccattgccggatcaagcagattatcaacatgtggcaggaagtggggcgggccatgtatgctccccctattgcaggaaatattacctgtatcagcaacattaccggcctgctgctgacaagagacgggggaaagaacaatacagagacttttaggcctggcgggggaaacatgaaagataattggcgctccgagctgtacaagtataaagtggtcaagatcgaaccactgggagtggcacctacccgatgtaaacggagagtggtcggaaggcgccgacggagaagggcagtgggaatcggagccgtcttcctgggctttctgggagcagctggcagcacaatgggagcagcctctatgaccctgacagtgcaggctcgaaatctgctgagtgggatcgtgcagcagcagtcaaacctgctgcgagcaccagaggcacagcagcatctgctgaagctgaccgtgtggggcatcaagcagctgcaggccagagtgctggctgtcgaacggtacctgagagatcagcagctgctgggaatctggggatgcagcggaaagctgatttgctgtacaaacgtgccctggaatagttcatggtcaaacaggaatctgagcgagatctgggacaatatgacctggctgcagtgggataaggaaatcagtaactacacacagatcatctatggcctgctggaggaatcacagaaccagcaggagaaaaatgaacaggacctgctggccctggattgatga

SEQ ID NO: 299 - DNA, 1989 bp, Artificial Sequence
  Description of Artificial Sequence: Synthetic polynucleotide
atgcccatgggctccctgcagcccctggccaccctgtacctgctgggcatgctggtggcctccgtgctggccggcgggggcgggggcggcgggggcgggggcggcgggggcgggggcgccgagaacctgtgggtgaccgtgtactacggcgtgcccgtgtggaaggaggccaagaccaccctgttctgcgcctccgacgccaaggcctacgagaagaaggtgcacaacgtgtgggccacccacgcctgcgtgcccaccgaccccaacccccaggagatggtgctgaagaacgtgaccgagaacttcaacatgtggaagaacgacatggtggaccagatgcacgaggacgtgatctccctgtgggaccagtccctgaagccctgcgtgaagctgacccccctgtgcgtgaccctgaactgcaccaacgccaccgcctccaactcctccatcatcgagggcatgaagaactgctccttcaacatcaccaccgagctgcgcgacaagcgcgagaagaagaacgccctgttctacaagctggacatcgtgcagctggacggcaactcctcccagtaccgcctgatcaactgcaacacctccgtgatcacccaggcctgccccaaggtgtccttcgaccccatccccatccactactgcgcccccgccggctacgccatcctgaagtgcaacaacaagaccttcaccggcaccggcccctgcaacaacgtgtccaccgtgcagtgcacccacggcatcaagcccgtggtgtccacccagctgctgctgaacggctccctggccgagggcgagatcatcatccgctccgagaacatcaccaagaacgtgaagaccatcatcgtgcacctgaacgagtccgtgaagatcgagtgcacccgccccaacaacaagacccgcacctccatccgcatcggccccggccagtggttctacgccaccggccaggtgatcggcgacatccgcgaggcctactgcaacatcaacgagtccaagtggaacgagaccctgcagcgcgtgtccaagaagctgaaggagtacttcccccacaagaacatcaccttccagccctcctccggcggcgacctggagatcaccacccactccttcaactgcggcggcgagttcttctactgcaacacctcctccctgttcaaccgcacctacatggccaactccaccgacatggccaactccaccgagaccaactccacccgcaccatcaccatccactgccgcatcaagcagatcatcaacatgtggcaggaggtgggccgcgccatgtacgccccccccatcgccggcaacatcacctgcatctccaacatcaccggcctgctgctgacccgcgacggcggcaagaacaacaccgagaccttccgccccggcggcggcaacatgaaggacaactggcgctccgagctgtacaagtacaaggtggtgaagatcgagcccctgggcgtggcccccacccgctgcaagcgccgcgtggtgggccgccgccgccgccgccgcgccgtgggcatcggcgccgtgttcctgggcttcctgggcgccgccggctccaccatgggcgccgcctccatgaccctgaccgtgcaggcccgcaacctgctgtccggcatcgtgcagcagcagtccaacctgctgcgcgcccccgaggcccagcagcacctgctgaagctgaccgtgtggggcatcaagcagctgcaggcccgcgtgctggccgtggagcgctacctgcgcgaccagcagctgctgggcatctggggctgctccggcaagctgatctgctgcaccaacgtgccctggaactcctcctggtccaaccgcaacctgtccgagatctgggacaacatgacctggctgcagtgggacaaggagatctccaactacacccagatcatctacggcctgctggaggagtcccagaaccagcaggagaagaacgagcaggacctgctggccctggactag

SEQ ID NO: 300 - protein, 662 aa, Artificial Sequence
  Description of Artificial Sequence: Synthetic polypeptide
MPMGSLQPLATLYLLGMLVASVLAGGGGGGGGGGGGGGGAENLWVTVYYGVPVWKEAKTTLFCASDAKAYEKKVHNVWATHACVPTDPNPQEMVLKNVTENFNMWKNDMVDQMHEDVISLWDQSLKPCVKLTPLCVTLNCTNATASNSSIIEGMKNCSFNITTELRDKREKKNALFYKLDIVQLDGNSSQYRLINCNTSVITQACPKVSFDPIPIHYCAPAGYAILKCNNKTFTGTGPCNNVSTVQCTHGIKPVVSTQLLLNGSLAEGEIIIRSENITKNVKTIIVHLNESVKIECTRPNNKTRTSIRIGPGQWFYATGQVIGDIREAYCNINESKWNETLQRVSKKLKEYFPHKNITFQPSSGGDLEITTHSFNCGGEFFYCNTSSLFNRTYMANSTDMANSTETNSTRTITIHCRIKQIINMWQEVGRAMYAPPIAGNITCISNITGLLLTRDGGKNNTETFRPGGGNMKDNWRSELYKYKVVKIEPLGVAPTRCKRRVVGRRRRRRAVGIGAVFLGFLGAAGSTMGAASMTLTVQARNLLSGIVQQQSNLLRAPEAQQHLLKLTVWGIKQLQARVLAVERYLRDQQLLGIWGCSGKLICCTNVPWNSSWSNRNLSEIWDNMTWLQWDKEISNYTQIIYGLLEESQNQQEKNEQDLLALD

SEQ ID NO: 301 - DNA, 1959 bp, Artificial Sequence
  Description of Artificial Sequence: Synthetic polynucleotide
atgcccatgggctccctgcagcccctggccaccctgtacctgctgggcatgctggtggcctccgtgctggccgccgagaacctgtgggtgaccgtgtactacggcgtgcccgtgtggaaggaggccaagaccaccctgttctgcgcctccgacgccaaggcctacgagaagaaggtgcacaacgtgtgggccacccacgcctgcgtgcccaccgaccccaacccccaggagatggtgctgaagaacgtgaccgagaacttcaacatgtggaagaacgacatggtggaccagatgcacgaggacgtgatctccctgtgggaccagtccctgaagccctgcgtgaagctgacccccctgtgcgtgaccctgaactgcaccaacgccaccgcctccaactcctccatcatcgagggcatgaagaactgctccttcaacatcaccaccgagctgcgcgacaagcgcgagaagaagaacgccctgttctacaagctggacatcgtgcagctggacggcaactcctcccagtaccgcctgatcaactgcaacacctccgtgatcacccaggcctgccccaaggtgtccttcgaccccatccccatccactactgcgcccccgccggctacgccatcctgaagtgcaacaacaagaccttcaccggcaccggcccctgcaacaacgtgtccaccgtgcagtgcacccacggcatcaagcccgtggtgtccacccagctgctgctgaacggctccctggccgagggcgagatcatcatccgctccgagaacatcaccaagaacgtgaagaccatcatcgtgcacctgaacgagtccgtgaagatcgagtgcacccgccccaacaacaagacccgcacctccatccgcatcggccccggccagtggttctacgccaccggccaggtgatcggcgacatccgcgaggcctactgcaacatcaacgagtccaagtggaacgagaccctgcagcgcgtgtccaagaagctgaaggagtacttcccccacaagaacatcaccttccagccctcctccggcggcgacctggagatcaccacccactccttcaactgcggcggcgagttcttctactgcaacacctcctccctgttcaaccgcacctacatggccaactccaccgacatggccaactccaccgagaccaactccacccgcaccatcaccatccactgccgcatcaagcagatcatcaacatgtggcaggaggtgggccgcgccatgtacgccccccccatcgccggcaacatcacctgcatctccaacatcaccggcctgctgctgacccgcgacggcggcaagaacaacaccgagaccttccgccccggcggcggcaacatgaaggacaactggcgctccgagctgtacaagtacaaggtggtgaagatcgagcccctgggcgtggcccccacccgctgcaagcgccgcgtggtgggccgccgccgccgccgccgcgccgtgggcatcggcgccgtgttcctgggcttcctgggcgccgccggctccaccatgggcgccgcctccatgaccctgaccgtgcaggcccgcaacctgctgtccggcatcgtgcagcagcagtccaacctgctgcgcgcccccgaggcccagcagcacctgctgaagctgaccgtgtggggcatcaagcagctgcaggcccgcgtgctggccgtggagcgctacctgcgcgaccagcagctgctgggcatctggggctgctccggcaagctgatctgctgcaccaacgtgccctggaactcctcctggtccaaccgcaacctgtccgagatctgggacaacatgacctggctgcagtgggacaaggagatctccaactacacccagatcatctacggcctgctggaggagtcccagaaccagcaggagaagaacgagcaggacctgctggccctggacctgcctagcaccggatag

SEQ ID NO: 302 - protein, 652 aa, Artificial Sequence
  Description of Artificial Sequence: Synthetic polypeptide
MPMGSLQPLATLYLLGMLVASVLAAENLWVTVYYGVPVWKEAKTTLFCASDAKAYEKKVHNVWATHACVPTDPNPQEMVLKNVTENFNMWKNDMVDQMHEDVISLWDQSLKPCVKLTPLCVTLNCTNATASNSSIIEGMKNCSFNITTELRDKREKKNALFYKLDIVQLDGNSSQYRLINCNTSVITQACPKVSFDPIPIHYCAPAGYAILKCNNKTFTGTGPCNNVSTVQCTHGIKPVVSTQLLLNGSLAEGEIIIRSENITKNVKTIIVHLNESVKIECTRPNNKTRTSIRIGPGQWFYATGQVIGDIREAYCNINESKWNETLQRVSKKLKEYFPHKNITFQPSSGGDLEITTHSFNCGGEFFYCNTSSLFNRTYMANSTDMANSTETNSTRTITIHCRIKQIINMWQEVGRAMYAPPIAGNITCISNITGLLLTRDGGKNNTETFRPGGGNMKDNWRSELYKYKVVKIEPLGVAPTRCKRRVVGRRRRRRAVGIGAVFLGFLGAAGSTMGAASMTLTVQARNLLSGIVQQQSNLLRAPEAQQHLLKLTVWGIKQLQARVLAVERYLRDQQLLGIWGCSGKLICCTNVPWNSSWSNRNLSEIWDNMTWLQWDKEISNYTQIIYGLLEESQNQQEKNEQDLLALDLPSTG

SEQ ID NO: 303 - protein, 7 aa, Artificial Sequence
  Description of Artificial Sequence: Synthetic peptide
  MOD_RES (3)..(3): Any amino acid
  MOD_RES (6)..(7): Any amino acid
LPXTGXX

SEQ ID NO: 304 - protein, 8 aa, Artificial Sequence
  Description of Artificial Sequence: Synthetic peptide
  MOD_RES (6)..(8): Any amino acid
GGGGGXXX

SEQ ID NO: 305 - protein, 12 aa, Artificial Sequence
  Description of Artificial Sequence: Synthetic peptide
  MOD_RES (3)..(3): Any amino acid
  MOD_RES (10)..(12): Any amino acid
LPXTGGGGGXXX

SEQ ID NO: 306 - protein, 10 aa, Artificial Sequence
  Description of Artificial Sequence: Synthetic peptide
  MOD_RES (1)..(3): Any amino acid
  MOD_RES (6)..(6): Any amino acid
  MOD_RES (9)..(10): Any amino acid
XXXLPXTGXX

SEQ ID NO: 307 - protein, 5 aa, Artificial Sequence
  Description of Artificial Sequence: Synthetic peptide
GGGGG

SEQ ID NO: 308 - protein, 12 aa, Artificial Sequence
  Description of Artificial Sequence: Synthetic peptide
  MOD_RES (1)..(3): Any amino acid
  MOD_RES (6)..(6): Any amino acid
XXXLPXTGGGGG

SEQ ID NO: 309 - protein, 5 aa, Artificial Sequence
  Description of Artificial Sequence: Synthetic peptide
GGGSG

SEQ ID NO: 310 - protein, 815 aa, Artificial Sequence
  Description of Artificial Sequence: Synthetic polypeptide
MPMGSLQPLATLYLLGMLVASVLAAENLWVTVYYGVPVWKEAKTTLFCASDAKAYEKKVHNVWATHACVPTDPNPQEMVLKNVTENFNMWKNDMVDQMHEDVISLWDQSLKPCVKLTPLCVTLNCTNATASNSSIIEGMKNCSFNITTELRDKREKKNALFYKLDIVQLDGNSSQYRLINCNTSVITQACPKVSFDPIPIHYCAPAGYAILKCNNKTFTGTGPCNNVSTVQCTHGIKPVVSTQLLLNGSLAEGEIIIRSENITNNVKTIIVHLNESVKIECTRPNNKTRTSIRIGPGQWFYATGQVIGDIREAYCNINESKWNETLQRVSKKLKEYFPHKNITFQPSSGGDLEITTHSFNCGGEFFYCNTSSLFNRTYMANSTDMANSTETNSTRTITIHCRIKQIINMWQEVGRAMYAPPIAGNITCISNITGLLLTRDGGKNNTETFRPGGGNMKDNWRSELYKYKVVKIEPLGVAPTRCKRRVVGRRRRRRAVGIGAVFLGFLGAAGSTMGAASMTLTVQARNLLSGIVQQQSNLLRAPEAQQHLLKLTVWGIKQLQARVLAVERYLRDQQLLGIWGCSGKLICCTNVPWNSSWSNRNLSEIWDNMTWLQWDKEISNYTQIIYGLLEESQNQQEKNEQDLLALDGGGSGDIIKLLNEQVNKEMNSSNLYMSMSSWCYTHSLDGAGLFLFDHAAEEYEHAKKLIIFLNENNVPVQLTSISAPEHKFEGLTQIFQKAYEHEQHISESINNIVDHAIKSKDHATFNFLQWYVAEQHEEEVLFKDILDKIELIGNENHGLYLADQYVKGIAKSRKS

SEQ ID NO: 311 - DNA, 2451 bp, Artificial Sequence
  Description of Artificial Sequence: Synthetic polynucleotide
atgcccatgggctccctgcagcccctggccaccctgtacctgctgggcatgctggtggcctccgtgctggccgccgagaacctgtgggtgaccgtgtactacggcgtgcccgtgtggaaggaggccaagaccaccctgttctgcgcctccgacgccaaggcctacgagaagaaggtgcacaacgtgtgggccacccacgcctgcgtgcccaccgaccccaacccccaggagatggtgctgaagaacgtgaccgagaacttcaacatgtggaagaacgacatggtggaccagatgcacgaggacgtgatctccctgtgggaccagtccctgaagccctgcgtgaagctgacccccctgtgcgtgaccctgaactgcaccaacgccaccgcctccaactcctccatcatcgagggcatgaagaactgctccttcaacatcaccaccgagctgcgcgacaagcgcgagaagaagaacgccctgttctacaagctggacatcgtgcagctggacggcaactcctcccagtaccgcctgatcaactgcaacacctccgtgatcacccaggcctgccccaaggtgtccttcgaccccatccccatccactactgcgcccccgccggctacgccatcctgaagtgcaacaacaagaccttcaccggcaccggcccctgcaacaacgtgtccaccgtgcagtgcacccacggcatcaagcccgtggtgtccacccagctgctgctgaacggctccctggccgagggcgagatcatcatccgctccgagaacatcaccaacaacgtgaagaccatcatcgtgcacctgaacgagtccgtgaagatcgagtgcacccgccccaacaacaagacccgcacctccatccgcatcggccccggccagtggttctacgccaccggccaggtgatcggcgacatccgcgaggcctactgcaacatcaacgagtccaagtggaacgagaccctgcagcgcgtgtccaagaagctgaaggagtacttcccccacaagaacatcaccttccagccctcctccggcggcgacctggagatcaccacccactccttcaactgcggcggcgagttcttctactgcaacacctcctccctgttcaaccgcacctacatggccaactccaccgacatggccaactccaccgagaccaactccacccgcaccatcaccatccactgccgcatcaagcagatcatcaacatgtggcaggaggtgggccgcgccatgtacgccccccccatcgccggcaacatcacctgcatctccaacatcaccggcctgctgctgacccgcgacggcggcaagaacaacaccgagaccttccgccccggcggcggcaacatgaaggacaactggcgctccgagctgtacaagtacaaggtggtgaagatcgagcccctgggcgtggcccccacccgctgcaagcgccgcgtggtgggccgccgccgccgccgccgcgccgtgggcatcggcgccgtgttcctgggcttcctgggcgccgccggctccaccatgggcgccgcctccatgaccctgaccgtgcaggcccgcaacctgctgtccggcatcgtgcagcagcagtccaacctgctgcgcgcccccgaggcccagcagcacctgctgaagctgaccgtgtggggcatcaagcagctgcaggcccgcgtgctggccgtggagcgctacctgcgcgaccagcagctgctgggcatctggggctgctccggcaagctgatctgctgcaccaacgtgccctggaactcctcctggtccaaccgcaacctgtccgagatctgggacaacatgacctggctgcagtgggacaaggagatctccaactacacccagatcatctacggcctgctggaggagtcccagaaccagcaggagaagaacgagcaggacctgctggccctggacggcggcggctccggcgacatcatcaagctgctgaacgagcaggtgaacaaggagatgaactcctccaacctgtacatgtccatgtcctcctggtgctacacccactccctggacggcgccggcctgttcctgttcgaccacgccgccgaggagtacgagcacgccaagaagctgatcatcttcctgaacgagaacaacgtgcccgtgcagctgacctccatctccgcccccgagcacaagttcgagggcctgacccagatcttccagaaggcctacgagcacgagcagcacatctccgagtccatcaacaacatcgtggaccacgccatcaagtccaaggaccacgccaccttcaacttcctgcagtggtacgtggccgagcagcacgaggaggaggtgctgttcaaggacatcctggacaagatcgagctgatcggcaacgagaaccacggcctgtacctggccgaccagtacgtgaagggcatcgccaagtcccgcaagtcctgataa

SEQ ID NO: 312 - protein, 815 aa, Artificial Sequence
  Description of Artificial Sequence: Synthetic polypeptide
MPMGSLQPLATLYLLGMLVASVLAAENLWVTVYYGVPVWKEAKTTLFCASDAKAYEKKVHNVWATHACVPTDPNPQEMVLKNVTENFNMWKNDMVDQMHEDVISLWDQSLKPCVKLTPLCVTLNCTNATASNSSIIEGMKNCSFNITTELRDKREKKNALFYKLDIVQLDGNSSQYRLINCNTSVITQACPKVSFDPIPIHYCAPAGYAILKCNNKTFTGTGPCNNVSTVQCTHGIKPVVSTQLLLNGSLAEGEIIIRSENITKNVKTIIVHLNESVKIECTRPNNKTRTSIRIGPGQWFYATGQVIGDIREAYCNINESKWNETLQRVSKKLKEYFPHKNITFQPSSGGDLEITTHSFNCGGEFFYCNTSSLFNRTYMANSTDMANSTETNSTRTITIHCRIKQIINMWQEVGRAMYAPPIAGNITCISNITGLLLTRDGGKNNTETFRPGGGNMKDNWRSELYKYKVVKIEPLGVAPTRCKRRVVGRRRRRRAVGIGAVFLGFLGAAGSTMGAASMTLTVQARNLLSGIVQQQSNLLRAPEAQQHLLKLTVWGIKQLQARVLAVERYLRDQQLLGIWGCSGKLICCTNVPWNSSWSNRNLSEIWDNMTWLQWDKEISNYTQIIYGLLEESQNQQEKNEQDLLALDGGGSGDIIKLLNEQVNKEMNSSNLYMSMSSWCYTHSLDGAGLFLFDHAAEEYEHAKKLIIFLNENNVPVQLTSISAPEHKFEGLTQIFQKAYEHEQHISESINNIVDHAIKSKDHATFNFLQWYVAEQHEEEVLFKDILDKIELIGNENHGLYLADQYVKGIAKSRKS

SEQ ID NO: 313 - DNA, 2451 bp, Artificial Sequence
  Description of Artificial Sequence: Synthetic polynucleotide
atgcccatgggctccctgcagcccctggccaccctgtacctgctgggcatgctggtggcctccgtgctggccgccgagaacctgtgggtgaccgtgtactacggcgtgcccgtgtggaaggaggccaagaccaccctgttctgcgcctccgacgccaaggcctacgagaagaaggtgcacaacgtgtgggccacccacgcctgcgtgcccaccgaccccaacccccaggagatggtgctgaagaacgtgaccgagaacttcaacatgtggaagaacgacatggtggaccagatgcacgaggacgtgatctccctgtgggaccagtccctgaagccctgcgtgaagctgacccccctgtgcgtgaccctgaactgcaccaacgccaccgcctccaactcctccatcatcgagggcatgaagaactgctccttcaacatcaccaccgagctgcgcgacaagcgcgagaagaagaacgccctgttctacaagctggacatcgtgcagctggacggcaactcctcccagtaccgcctgatcaactgcaacacctccgtgatcacccaggcctgccccaaggtgtccttcgaccccatccccatccactactgcgcccccgccggctacgccatcctgaagtgcaacaacaagaccttcaccggcaccggcccctgcaacaacgtgtccaccgtgcagtgcacccacggcatcaagcccgtggtgtccacccagctgctgctgaacggctccctggccgagggcgagatcatcatccgctccgagaacatcaccaagaacgtgaagaccatcatcgtgcacctgaacgagtccgtgaagatcgagtgcacccgccccaacaacaagacccgcacctccatccgcatcggccccggccagtggttctacgccaccggccaggtgatcggcgacatccgcgaggcctactgcaacatcaacgagtccaagtggaacgagaccctgcagcgcgtgtccaagaagctgaaggagtacttcccccacaagaacatcaccttccagccctcctccggcggcgacctggagatcaccacccactccttcaactgcggcggcgagttcttctactgcaacacctcctccctgttcaaccgcacctacatggccaactccaccgacatggccaactccaccgagaccaactccacccgcaccatcaccatccactgccgcatcaagcagatcatcaacatgtggcaggaggtgggccgcgccatgtacgccccccccatcgccggcaacatcacctgcatctccaacatcaccggcctgctgctgacccgcgacggcggcaagaacaacaccgagaccttccgccccggcggcggcaacatgaaggacaactggcgctccgagctgtacaagtacaaggtggtgaagatcgagcccctgggcgtggcccccacccgctgcaagcgccgcgtggtgggccgccgccgccgccgccgcgccgtgggcatcggcgccgtgttcctgggcttcctgggcgccgccggctccaccatgggcgccgcctccatgaccctgaccgtgcaggcccgcaacctgctgtccggcatcgtgcagcagcagtccaacctgctgcgcgcccccgaggcccagcagcacctgctgaagctgaccgtgtggggcatcaagcagctgcaggcccgcgtgctggccgtggagcgctacctgcgcgaccagcagctgctgggcatctggggctgctccggcaagctgatctgctgcaccaacgtgccctggaactcctcctggtccaaccgcaacctgtccgagatctgggacaacatgacctggctgcagtgggacaaggagatctccaactacacccagatcatctacggcctgctggaggagtcccagaaccagcaggagaagaacgagcaggacctgctggccctggacggcggcggctccggcgacatcatcaagctgctgaacgagcaggtgaacaaggagatgaactcctccaacctgtacatgtccatgtcctcctggtgctacacccactccctggacggcgccggcctgttcctgttcgaccacgccgccgaggagtacgagcacgccaagaagctgatcatcttcctgaacgagaacaacgtgcccgtgcagctgacctccatctccgcccccgagcacaagttcgagggcctgacccagatcttccagaaggcctacgagcacgagcagcacatctccgagtccatcaacaacatcgtggaccacgccatcaagtccaaggaccacgccaccttcaacttcctgcagtggtacgtggccgagcagcacgaggaggaggtgctgttcaaggacatcctggacaagatcgagctgatcggcaacgagaaccacggcctgtacctggccgaccagtacgtgaagggcatcgccaagtcccgcaagtcctagtaa

SEQ ID NO: 314 - protein, 96 aa, Homo sapiens
QVQLVQSGAEVKKPGASVKVSCKASGYTFTSYYMHWVRQAPGQGLEWMGIINPSGGSTSYAQKFQGRVTMTRDTSTSTVYMELSSLRSEDTAVYYC

SEQ ID NO: 315 - protein, 96 aa, Artificial Sequence
  Description of Artificial Sequence: Synthetic polypeptide
QVQLVQSGAEVKKPGASVTVSCQASGYTFTNYYVHWVRQAPGQGLQLMGWIDPSWGRTNYAQNFQGRITMTRDTSTSTVYMEMRSLRSEDTAVYYC

SEQ ID NO: 316 - protein, 96 aa, Artificial Sequence
  Description of Artificial Sequence: Synthetic polypeptide
QVRLLQYGGGVKRPGASMTISCVASGYNFNDYYIHWVRQAPGQGLELMGWIDPSGGRTDYAGAFGDRVSMYRDKSMNTLYMDLRSLRSGDTAMYYC

SEQ ID NO: 317 - protein, 96 aa, Artificial Sequence
  Description of Artificial Sequence: Synthetic polypeptide
QVRLAQYGGGVKRLGATMTLSCVASGYTFNDYYIHWVRQAPGQGFELLGYIDPANGRPDYAGALRERLSFYRDKSMETLYMDLRSLRYDDTAMYYC

SEQ ID NO: 318 - protein, 96 aa, Artificial Sequence
  Description of Artificial Sequence: Synthetic polypeptide
QVQLEQSGTAVRKPGASVTLSCQASGYNFVKYIIHWVRQKPGLGFEWVGMIDPYRGRPWSAHKFQGRLSLSRDTSMEILYMTLTSLKSDDTATYFC

SEQ ID NO: 319 - protein, 95 aa, Artificial Sequence
  Description of Artificial Sequence: Synthetic polypeptide
QGQLVQSGGGLKKPGTSVTISCLASEYTFNEFVIHWIRQAPGQGPLWLGLIKRSGRLMTAYNFQDRLSLRRDRSTGTVFMELRGLRPDDTAVYYC

SEQ ID NO: 320 - protein, 96 aa, Homo sapiens
QVQLVQSGAEVKKPGASVKVSCKASGYTFTGYYMHWVRQAPGQGLEWMGWINPNSGGTNYAQKFQGRVTMTRDTSISTAYMELSRLRSDDTAVYYC

SEQ ID NO: 321 - protein, 96 aa, Artificial Sequence
  Description of Artificial Sequence: Synthetic polypeptide
QVQLVQSGGQMKKPGESMRISCRASGYEFIDCTLNWIRLAPGKRPEWMGWLKPRGGAVNYARPLQGRVTMTRDVYSDTAFLELRSLTVDDTAVYFC

SEQ ID NO: 322 - protein, 105 aa, Artificial Sequence
  Description of Artificial Sequence: Synthetic polypeptide
QVQLVQSGAAVRKPGASVTVSCKFAEDDDYSPYWVNPAPEHFIHFLRQAPGQQLEWLAWMNPTNGAVNYAWYLNGRVTATRDRSMTTAFLEVKSLRSDDTAVYYC

SEQ ID NO: 323 - protein, 98 aa, Artificial Sequence
  Description of Artificial Sequence: Synthetic polypeptide
QVQLVQSGSGVKKPGASVRVSCWTSEDIFERTELIHWVRQAPGQGLEWIGWVKTVTGAVNFGSPDFRQRVSLTRDRDLFTAHMDIRGLTQGDTATYFC

SEQ ID NO: 324 - protein, 98 aa, Homo sapiens
QVQLVQSGAEVKKPGASVKVSCKASGYTFTSYYMHWVRQAPGQGLEWMGIINPSGGSTSYAQKFQGRVTMTRDTSTSTVYMELSSLRSEDTAVYYCAR

SEQ ID NO: 325 - protein, 98 aa, Homo sapiens; identical to SEQ ID NO: 324

SEQ ID NO: 326 - protein, 63 aa, Artificial Sequence
  Description of Artificial Sequence: Synthetic polypeptide
WVRQAPGQGLEWMGMINPSGGSTSYAQKFQGRVTMTRDTSTSTVYMYLSSLRSEDTAVYYCVR

SEQ ID NO: 327 - protein, 63 aa, Artificial Sequence
  Description of Artificial Sequence: Synthetic polypeptide
WVRQAPGQGLEWMGMINPSGGRTSYPYKFQGRVTMTRDTSTSTVYMEVSSLRSEDTAVYYCVR

SEQ ID NO: 328 - protein, 63 aa, Artificial Sequence
  Description of Artificial Sequence: Synthetic polypeptide
WVRQAPGQGLEWMGMIDPSGGRTSYAQKFQGRVTMTRDTSTSTVYMELSSLRSEDTAVHYCAR

SEQ ID NO: 329 - protein, 63 aa, Artificial Sequence
  Description of Artificial Sequence: Synthetic polypeptide
WVRQAPGQGLEWMGMIDPSVGRTTYAEKFQGRVTMTRDTSTSTVYMDLSSLRSEHTAVYYCAR

SEQ ID NO: 330 - protein, 63 aa, Artificial Sequence
  Description of Artificial Sequence: Synthetic polypeptide
WVRQAPGQGLEWMGMIDPSVGRTTYAEKFQGRVTMTRDTSTSTVYMDLSSLRSEDTAVYYCAR

SEQ ID NO: 331 - protein, 63 aa, Artificial Sequence; identical to SEQ ID NO: 330
  Description of Artificial Sequence: Synthetic polypeptide

SEQ ID NO: 332 - protein, 63 aa, Artificial Sequence
  Description of Artificial Sequence: Synthetic polypeptide
WVRQAPGQGLEWMGMINPRGGSTTYAQRFQGRVTMTRDTSTSIVYMELSRLRSEDTAVYYCVR

SEQ ID NO: 333 - protein, 63 aa, Artificial Sequence
  Description of Artificial Sequence: Synthetic polypeptide
WVRQAPGQGLEWMGMINPSGGRTSSPYKFQGRLTMTRDTSTSTVYMDLSSLRPDDTAVYYCVR

SEQ ID NO: 334 - protein, 63 aa, Artificial Sequence
  Description of Artificial Sequence: Synthetic polypeptide
WVRQAPGQGLEWMGMVNPSGGRTSYPHKFQGRVTMTRDTSTSTVYMGLSSLRSEDTAVYYCAR

SEQ ID NO: 335 - protein, 63 aa, Artificial Sequence
  Description of Artificial Sequence: Synthetic polypeptide
WVRQAPGAGLEWMGMINPSGGRTTYPQKFQGRVTMTRDTSTSTVHMKLSSLRSQDTAVYYCAR

SEQ ID NO: 336 - protein, 63 aa, Artificial Sequence
  Description of Artificial Sequence: Synthetic polypeptide
WVRQAPGAGLEWMGMINPSGGRTTYPQKFQGRVTMTRDTSTSTVYMKLSSLRSQDTAVYYCAR

SEQ ID NO: 337 - protein, 63 aa, Artificial Sequence; identical to SEQ ID NO: 336
  Description of Artificial Sequence: Synthetic polypeptide

SEQ ID NO: 338 - protein, 63 aa, Artificial Sequence
  Description of Artificial Sequence: Synthetic polypeptide
WVRQAPGQGLEWMGMIDPSGGRTSYAPKFQGRLTMTRDTSTDTLYMQLNSLRSEDTAVYYCAR

SEQ ID NO: 339 - protein, 63 aa, Artificial Sequence
  Description of Artificial Sequence: Synthetic polypeptide
WVRQAPGQGLEWMGMIDPSYGRTSYAQKFQGRVTMTRDTSTSTVYMELSSLRSEDTAVFYCAR

SEQ ID NO: 340 - protein, 63 aa, Artificial Sequence; identical to SEQ ID NO: 339
  Description of Artificial Sequence: Synthetic polypeptide

SEQ ID NO: 341 - protein, 63 aa, Artificial Sequence; identical to SEQ ID NO: 330
  Description of Artificial Sequence: Synthetic polypeptide

SEQ ID NO: 342 - protein, 63 aa, Artificial Sequence
  Description of Artificial Sequence: Synthetic polypeptide
WVRQAPGQGLEWMGMLDPSGGRTSYPQKFQGRVTMTRDTSTSTVYMYLSSLRSEDTAVYYCVR

SEQ ID NO: 343 - protein, 63 aa, Artificial Sequence
  Description of Artificial Sequence: Synthetic polypeptide
WVRQAPGQRLEWMGLINPSGGRTSYPHQFQGRVTMTRDTSTSTVYMYLSSLRAEDTAVYYCVR

SEQ ID NO: 344 - protein, 63 aa, Artificial Sequence
  Description of Artificial Sequence: Synthetic polypeptide
WVRQAPGQGLEWMGMLDPSGGRTSHPHKFQGRVTLTRDTSTSTVYMYLSSLRSEDTAVYYCVR

SEQ ID NO: 345 - protein, 63 aa, Artificial Sequence; identical to SEQ ID NO: 333
  Description of Artificial Sequence: Synthetic polypeptide

SEQ ID NO: 346 - protein, 63 aa, Artificial Sequence
  Description of Artificial Sequence: Synthetic polypeptide
WVRQAPGQGLEWMGMIDPSGGRPSYAQKFQGRVSMTRDTSTSTVYMELSSLRSEDTALYYCVR

SEQ ID NO: 347 - protein, 63 aa, Artificial Sequence; identical to SEQ ID NO: 338
  Description of Artificial Sequence: Synthetic polypeptide

SEQ ID NO: 348 - protein, 63 aa, Artificial Sequence
  Description of Artificial Sequence: Synthetic polypeptide
WVRQAPGQGLKWVGMLDPSGGRTTLAHTFQGRVTMTRDTSTSTVYMELNSLRSEDTAVYYCAR

SEQ ID NO: 349 - protein, 58 aa, Artificial Sequence
  Description of Artificial Sequence: Synthetic polypeptide
PGQGLKWVGMLDPSGGRTTLAHTFQGRVTMTRDTSTSTVYMELNSLRSEDTAVYYCAR

SEQ ID NO: 350 - protein, 63 aa, Artificial Sequence; identical to SEQ ID NO: 348
  Description of Artificial Sequence: Synthetic polypeptide

SEQ ID NO: 351 - protein, 63 aa, Artificial Sequence
  Description of Artificial Sequence: Synthetic polypeptide
WVRQAPGQGLEWVGMIDPSVGRTTLPHKFQGRVTMTRDTSTSTVYMKLSTLRSEDTAVYFCAR

SEQ ID NO: 352 - protein, 62 aa, Artificial Sequence
  Description of Artificial Sequence: Synthetic polypeptide
VRQAPGQRLELMGMIDPSRGRTDYAQKFQGRVTMSRDTSTSTLYMELRSLRPDDTALYYCVR

SEQ ID NO: 353 - protein, 63 aa, Artificial Sequence
  Description of Artificial Sequence: Synthetic polypeptide
WVRQAPGQGLDSMGWIDPSVGRTSYSYKFRDRISMFRDTSTNTVYMELRSLRSDDTAVYYCVR

SEQ ID NO: 354 - protein, 63 aa, Artificial Sequence
  Description of Artificial Sequence: Synthetic polypeptide
WVRQAPGQRLEWMGMIDPSVGRPTVAGNFQGRVTLTRDRSTDTVYMDLSSLRSEDTAVYYCAR

SEQ ID NO: 355 - protein, 63 aa, Artificial Sequence
  Description of Artificial Sequence: Synthetic polypeptide
WVRQAPGQGLEWMGMIDPSVGRPTRAGKFQGRVTMTRDRSTSTVYMDLSSLRSEDTAMYYCAR

SEQ ID NO: 356 - protein, 63 aa, Artificial Sequence
  Description of Artificial Sequence: Synthetic polypeptide
WVRQAPGQGLEWMGMIDPSVGRPTRAGKFQGRVTMTRDRSTSTVYMDLSSLKSEDTAVYYCAR

SEQ ID NO: 357 - protein, 63 aa, Artificial Sequence
  Description of Artificial Sequence: Synthetic polypeptide
WVRQAPGQGPEWMGMIDPSFGRPTRPGRFQDRVTLTRDKSTSTVYMDLSSLRPEDTAVYYCAR

SEQ ID NO: 358 - protein, 63 aa, Artificial Sequence
  Description of Artificial Sequence: Synthetic polypeptide
WVRQAPGQRLEWMGMIDPSVGRPSRPYKFQDRVTMTRDRFTNTVYMDLSSLRSEDTAVYYCAR

SEQ ID NO: 359 - protein, 63 aa, Artificial Sequence
  Description of Artificial Sequence: Synthetic polypeptide
WVRQAPGQGFECMGMLDPSGGRTDYSHKFQGRVTMTRDTSTSTVYMSLRSLKSEDTAVYYCVR

SEQ ID NO: 360 - protein, 63 aa, Artificial Sequence; identical to SEQ ID NO: 359
  Description of Artificial Sequence: Synthetic polypeptide

SEQ ID NO: 361 - protein, 63 aa, Artificial Sequence; identical to SEQ ID NO: 359
  Description of Artificial Sequence: Synthetic polypeptide

SEQ ID NO: 362 - protein, 98 aa, Artificial Sequence
  Description of Artificial Sequence: Synthetic polypeptide
QVQLVQSGAEVKKPGASVTVSCQASGYTFTNYYVHWVRQAPGQGLQLMGWIDPSWGRTNYAQNFQGRITMTRDTSTSTVYMEMRSLRSEDTAVYYCAR

SEQ ID NO: 363 - protein, 98 aa, Artificial Sequence
  Description of Artificial Sequence: Synthetic polypeptide
QVQLVQSGAAVKRPGASVTISCRASGYTFTTYYIHWVRQAPGQRLELMGMIDPSRGRTDYAQKFQGRVTMSRDTSTSTLYMELRSLRPDDTALYYCVR

SEQ ID NO: 364 - protein, 122 aa, Artificial Sequence
  Description of Artificial Sequence: Synthetic polypeptide
QVQLVQSGAEVRKPGASVTVSCKASGYTFNNFYVHWVRQAPGQGLECMGWIDPSVGRINYAQKFQGRVTMTRDRSTSTVYMGLSSLRSEDTAIYYCVRDVGTEGSLLHFDHWGQGTLVIVSA

SEQ ID NO: 365 - protein, 122 aa, Artificial Sequence
  Description of Artificial Sequence: Synthetic polypeptide
QVQLVQSGTEVRKPGASVTISCKASGYTFNNFYVHWVRQAPGQGLECMGWIDPSVGRISYGQKFQGRVTMTRDRSTSTVYMGLSSLRSEDTAMYYCVRDVGTEGSLLHFDHWGQGTLVIVSA

SEQ ID NO: 366 - protein, 122 aa, Artificial Sequence
  Description of Artificial Sequence: Synthetic polypeptide
QVQLVQSGAAVKKPGASVRVSCKASGYTFTSSHIHWVRQAPGQGPEWMGMIDPSVGRPTTAGKFQGRVTMTRDRYTSTAYMDLSSLRSEDTAVYYCARSVETTGSLLYFDYWGQGTLITVSS

SEQ ID NO: 367 - protein, 63 aa, Artificial Sequence
  Description of Artificial Sequence: Synthetic polypeptide
WVRQAPGQGLELMGWIDPSVGRINYGQKFEGRVTMTRDRSTSTVYMGLSSLKSEDTAVYYCVR

SEQ ID NO: 368 - protein, 63 aa, Artificial Sequence
  Description of Artificial Sequence: Synthetic polypeptide
WVRQAPGQGLELMGWIDPSVGRINYGQKFQGRVTMTRDRSTSTVYMGLSSLRSEDTAIYYCVR

SEQ ID NO: 369 - protein, 63 aa, Artificial Sequence; identical to SEQ ID NO: 368
  Description of Artificial Sequence: Synthetic polypeptide

SEQ ID NO: 370 - protein, 63 aa, Artificial Sequence
  Description of Artificial Sequence: Synthetic polypeptide
WVRQAPGQRLELMGWIDPYRGRTDYAQKFQDRVSMYRDTSTNTLYMDLRSLRPDDTALYYCVR

SEQ ID NO: 371 - protein, 63 aa, Artificial Sequence
  Description of Artificial Sequence: Synthetic polypeptide
WVRQAPGQGLELMGWIDPSGGRTDYSQAFQGRISMFRDTSTSTVYMELRSLRSGDTAMYYCVR

SEQ ID NO: 372 - protein, 98 aa, Artificial Sequence
  Description of Artificial Sequence: Synthetic polypeptide
QVQLVQSGAAVKKPGASVRVSCKASGYTFTSSHIHWVRQAPGQALEWLGMIDPRFGRPTRPQKFQGRVTLTRDTYTTTVYMSLSSLTPEDTAVYYCAR

SEQ ID NO: 373 - protein, 98 aa, Artificial Sequence
  Description of Artificial Sequence: Synthetic polypeptide
QVQLVQSGAAVKRPGASVTISCRASGYTFTTYYIHWVRQAPGQGLELMGWINPRGGRTDYSYRFEDRVSMYRDTSMSIVYMDLRNLKSADTAVYYCVR

SEQ ID NO: 374 - protein, 98 aa, Artificial Sequence
  Description of Artificial Sequence: Synthetic polypeptide
QVQLVQSGAAVKKPGASVRVSCKASGYTFTSSHIHWVRQAPGQGPEWMGMVDPRFGRPTYAQKFQGRVAMTRDIYTSTVYMDLRSLKSEDTAIYFCVR

SEQ ID NO: 375 - protein, 98 aa, Artificial Sequence
  Description of Artificial Sequence: Synthetic polypeptide
QVRLLQYGGGVKRPGASMTISCVASGYNFNDYYIHWVRQAPGQGLELMGWIDPSGGRTDYAGAFGDRVSMYRDKSMNTLYMDLRSLRSGDTAMYYCVR

SEQ ID NO: 376 - protein, 98 aa, Artificial Sequence
  Description of Artificial Sequence: Synthetic polypeptide
QVQLVQSGATVKKPRASVTLSCRTSGYNFIDYFIHWVRRAPGQRLEVMGYIDPSRGRPDYAPNFRDRVSLYRDTSMSIVYLDLRDLTPDDTAIYYCVR

SEQ ID NO: 377 - protein, 98 aa, Artificial Sequence
  Description of Artificial Sequence: Synthetic polypeptide
QVQLVQSGGTVKSPGTSVTLSCKTSGYNFIDYYIHWVRRAPGQRPELMGYIDPSHGRPDYEGKFRDRISLYRDTSTSVVYMDVRGLRLDDTALYYCVR

SEQ ID NO: 378 - protein, 98 aa, Artificial Sequence
  Description of Artificial Sequence: Synthetic polypeptide
QVRLAQYGGGVKRLGATMTLSCVASGYTFNDYYIHWVRQAPGQGFELLGYIDPANGRPDYAGALRERLSFYRDKSMETLYMDLRSLRYDDTAMYYCVR

SEQ ID NO: 379 - protein, 98 aa, Artificial Sequence
  Description of Artificial Sequence: Synthetic polypeptide
QVQLVQSGGGVKRPGSTTTISCVASGYSFNDYYIHWVRQAPGQGLEVLGFIDPSNGRTNYAGAFGDRFSMYRDKSMETLYMDLRNLRSDDTAMYYCVR

SEQ ID NO: 380 - protein, 98 aa, Artificial Sequence
  Description of Artificial Sequence: Synthetic polypeptide
QVQLEQSGTAVRKPGASVTLSCQASGYNFVKYIIHWVRQKPGLGFEWVGMIDPYRGRPWSAHKFQGRLSLSRDTSMEILYMTLTSLKSDDTATYFCAR

SEQ ID NO: 381 - protein, 97 aa, Artificial Sequence
  Description of Artificial Sequence: Synthetic polypeptide
QGQLVQSGGGLKKPGTSVTISCLASEYTFNEFVIHWIRQAPGQGPLWLGLIKRSGRLMTAYNFQDRLSLRRDRSTGTVFMELRGLRPDDTAVYYCAR

SEQ ID NO: 382 - protein, 98 aa, Homo sapiens
QVQLVQSGAEVKKPGASVKVSCKASGYTFTGYYMHWVRQAPGQGLEWMGWINPNSGGTNYAQKFQGRVTMTRDTSISTAYMELSRLRSDDTAVYYCAR

SEQ ID NO: 383 - protein, 98 aa, Artificial Sequence
  Description of Artificial Sequence: Synthetic polypeptide
QVQLVQSGGQMKKPGESMRISCRASGYEFIDCTLNWIRLAPGKRPEWMGWLKPRGGAVNYARPLQGRVTMTRDVYSDTAFLELRSLTVDDTAVYFCTR

SEQ ID NO: 384 - protein, 107 aa, Artificial Sequence
  Description of Artificial Sequence: Synthetic polypeptide
QVQLVQSGAAVRKPGASVTVSCKFAEDDDYSPYWVNPAPEHFIHFLRQAPGQQLEWLAWMNPTNGAVNYAWYLNGRVTATRDRSMTTAFLEVKSLRSDDTAVYYCAR

SEQ ID NO: 385 - protein, 100 aa, Artificial Sequence
  Description of Artificial Sequence: Synthetic polypeptide
QVQLVQSGSGVKKPGASVRVSCWTSEDIFERTELIHWVRQAPGQGLEWIGWVKTVTGAVNFGSPDFRQRVSLTRDRDLFTAHMDIRGLTQGDTATYFCAR

SEQ ID NO: 386 - protein, 98 aa, Homo sapiens; identical to SEQ ID NO: 324

SEQ ID NO: 387 - protein, 97 aa, Artificial Sequence; identical to SEQ ID NO: 381
  Description of Artificial Sequence: Synthetic polypeptide

SEQ ID NO: 388 - protein, 98 aa, Artificial Sequence; identical to SEQ ID NO: 362
  Description of Artificial Sequence: Synthetic polypeptide

SEQ ID NO: 389 - protein, 122 aa, Artificial Sequence
  Description of Artificial Sequence: Synthetic polypeptide
QVQLVQSGAAVKRPGASVTISCRASGYTFTTYYIHWVRQAPGQRLELMGMIDPSRGRTDYAQKFQGRVTMSRDTSTSTLYMELRSLRPDDTALYYCVRNVGTEGSLLHYDYWGQGTLVTVSS

SEQ ID NO: 390 - protein, 122 aa, Artificial Sequence
  Description of Artificial Sequence: Synthetic polypeptide
QVRLLQYGGGVKRPGASMTISCVASGYNFNDYYIHWVRQAPGQGLELMGWIDPSGGRTDYAGAFGDRVSMYRDKSMNTLYMDLRSLRSGDTAMYYCVRNVGTAGSLLHYDHWGLGVMVTVSS

SEQ ID NO: 391 - protein, 122 aa, Artificial Sequence
  Description of Artificial Sequence: Synthetic polypeptide
QVRLAQYGGGVKRLGATMTLSCVASGYTFNDYYIHWVRQAPGQGFELLGYIDPANGRPDYAGALRERLSFYRDKSMETLYMDLRSLRYDDTAMYYCVRNVGTAGSLLHYDHWGSGSPVIVSS

SEQ ID NO: 392 - protein, 122 aa, Artificial Sequence
  Description of Artificial Sequence: Synthetic polypeptide
QVQLVQSGGGVKRPGSTTTISCVASGYSFNDYYIHWVRQAPGQGLEVLGFIDPSNGRTNYAGAFGDRFSMYRDKSMETLYMDLRNLRSDDTAMYYCVRNVGTAGSLLHYDHWGTGSKIIVSS

SEQ ID NO: 393 - protein, 122 aa, Artificial Sequence
  Description of Artificial Sequence: Synthetic polypeptide
QVQLVQSGATVKKPRASVTLSCRTSGYNFIDYFIHWVRRAPGQRLEVMGYIDPSRGRPDYAPNFRDRVSLYRDTSMSIVYLDLRDLTPDDTAIYYCVRSEGTEGTVLHYDHWGPGTRVTVSP

SEQ ID NO: 394 - protein, 122 aa, Artificial Sequence
  Description of Artificial Sequence: Synthetic polypeptide
QVQLVQSGGTVKSPGTSVTLSCKTSGYNFIDYYIHWVRRAPGQRPELMGYIDPSHGRPDYEGKFRDRISLYRDTSTSVVYMDVRGLRLDDTALYYCVRGGGVEVSSNHYDHWGPGTMVFVSP

SEQ ID NO: 395 - protein, 122 aa, Artificial Sequence
  Description of Artificial Sequence: Synthetic polypeptide
QVQLVQSGAAVKRPGASVTISCRASGYTFTTYYIHWVRQAPGQGLELMGWINPRGGRTDYSYRFEDRVSMYRDTSMSIVYMDLRNLKSADTAVYYCVRNVGTSGSLLHYDFWGQGSLVTVSS

SEQ ID NO: 396 - protein, 5 aa, Artificial Sequence
  Description of Artificial Sequence: Synthetic peptide
  MOD_RES (3)..(3): Any amino acid
LPXTG

What is claimed is:

1. A recombinant HIV-1 envelope polypeptide from Table 1, wherein the polypeptide is a non-naturally occurring protomer designed to form an envelope trimer.

2. A nucleic acid encoding the recombinant polypeptide of claim 1.

3. A recombinant trimer comprising three identical protomers of an envelope from Table 1.

4. An immunogenic composition comprising the recombinant trimer of claim 3 and a carrier, wherein the trimer comprises three identical protomers of an HIV-1 envelope listed in Table 1.

5. An immunogenic composition comprising nucleic acid encoding the recombinant HIV-1 envelope of claim 1 and a carrier.

6. The composition of claim 4 or 5 further comprising an adjuvant.

7. The composition of any one of claim 2 or 5 wherein the nucleic acid is operably linked to a promoter inserted in an expression vector.

8. A method of inducing an immune response in a subject comprising administering a composition comprising any suitable form of a nucleic acid(s) encoding an HIV-1 envelope(s) in an amount sufficient to induce an immune response from one or more of the following groups:
(a) envelopes M5, M11, w20.14, w30.20, w30.12, and w136.B18 (Selection F, e.g. listed in FIG. 18A) or any combination thereof,
(b) envelopes M5, w30.25, w53.25, and w53.29 (Selection G, e.g. FIG. 20) or any combination thereof;
(c) envelopes M5, w30.20, w20.14, and w30.12 (Selection H, e.g. FIG. 21) or any combination thereof,
and wherein the administration step can alternatively, or in addition, comprise administering an HIV-1 polypeptide(s) in an amount sufficient to induce an immune response from one or more of the following groups:
(a) envelopes M5, M11, w20.14, w30.20, w30.12, and w136.B18 (Selection F, e.g. listed in FIG. 18A) or any combination thereof,
(b) envelopes M5, w30.25, w53.25, and w53.29 (Selection G, e.g. FIG. 20) or any combination thereof;
(c) envelopes M5, w30.20, w20.14, and w30.12 (Selection H, e.g. FIG. 21) or any combination thereof.

9. The method of claim 8, wherein the composition comprises HIV-1 envelope M5 or a nucleic acid encoding HIV-1 envelope M5 that is administered as a prime immunogen.

10. The method of claim 9, further comprising administering HIV-1 envelope M11 or HIV-1 envelope M11.

11. The method of claim 9 or 10, further comprising administering HIV-1 envelope w20.14 or a nucleic acid encoding HIV-1 envelope w20.14, followed by administering HIV-1 envelope w30.20 or a nucleic acid encoding HIV-1 envelope w30.20, and followed by administering HIV-1 envelope w30.12 or a nucleic acid encoding HIV-1 envelope w30.12.

12. The method of claim 11, further comprising administering HIV-1 envelope w136.B18 or a nucleic acid encoding HIV-1 envelope w136.B18.

13. The method of claim 9, further comprising administering HIV-1 envelope w30.25 or a nucleic acid encoding HIV-1 envelope w30.25, HIV-1 envelope w53.25 or a nucleic acid encoding HIV-1 envelope w53.25, HIV-1 envelope w53.29 or a nucleic acid encoding HIV-1 envelope w53.29.

14. The method of claim 8 wherein the nucleic acid encodes a gp120 envelope, gp120D8 envelope, a gp140 envelope (gp140C, gp140CF, gp140CFI) as soluble or stabilized protomer of a SOSIP trimer, a gp145 envelope, a gp150 envelope, or a transmembrane bound envelope.

15. The method of claim 8 wherein the polypeptide is gp120 envelope, gp120D8 envelope, a gp140 envelope (gp140C, gp140CF, gp140CFI) as soluble or stabilized protomer of a SOSIP trimer, a gp145 envelope, a gp150 envelope, or a transmembrane bound envelope.

16. The method of claim 8, wherein the composition further comprises an adjuvant.

17. The method of claim 8, further comprising administering an agent which modulates host immune tolerance.

18. The method of claim 15, wherein the polypeptide administered is multimerized in a liposome or nanoparticle.

19. The method of claim 8, further comprising administering one or more additional HIV-1 immunogens to induce a T cell response.
